(19) United States
(12) Patent Application Publication
(10) Pub. No.: US 2024/0034777 A1
(43) Pub. Date: Feb. 1, 2024

(54) ANTI-TAU ANTIBODIES AND USES THEREOF

(71) Applicants: Eisai R&D Management Co., Ltd, Tokyo (JP); UCL Business LTD, London (GB)

(72) Inventors: Malcolm Ian Roberts, Hertfordshire (GB); James Martin Staddon, Hertfordshire (GB); Hettihewage Alfred Rohan De Silva, London (GB); Jared Spidel, Downingtown, PA (US); Hirofumi Aoyagi, Ibaraki (JP); Shigeru Akasofu, Ibaraki (JP); Yutaka Hashizume, Ibaraki (JP); Kishan Agarwala, Ibaraki (JP)

(21) Appl. No.: 18/149,905

(22) Filed: Jan. 4, 2023

Related U.S. Application Data
(63) Continuation of application No. 17/030,655, filed on Sep. 24, 2020, now Pat. No. 11,578,120.
Application No. 17/030,655 is a continuation of application No. 16/161,586, filed on Oct. 16, 2018, now Pat. No. 10,829,547.
(60) Provisional application No. 62/572,910, filed on Oct. 16, 2017.
(60) Provisional application No. 62/577,011, filed on Oct. 25, 2017.
(60) Provisional application No. 62/697,034, filed on Jul. 12, 2018.

(51) Int. Cl. C07K 16/18; C07K 14/47; C12N 15/85; A61P 25/28; C12N 15/62

(52) U.S. Cl. CPC C07K 16/18; C07K 14/4711; C12N 15/85; A61P 25/28; C12N 15/62; A61K 39/3955; C07K 2317/24; C12N 2015/8518; C07K 2317/56; C07K 2317/34; C07K 2317/76; C07K 2317/565

(57) ABSTRACT

Provided herein are antibodies that specifically bind Tau and methods of using the same.

### CROSS-REFERENCE TO RELATED APPLICATIONS

[0001] This application is a continuation of U.S. application Ser. No. 17/030,655, filed Sep. 24, 2020, which is a continuation of U.S. application Ser. No. 16/161,586, filed Oct. 16, 2018, issued as U.S. Pat. No. 10,829,547, which claims the benefit of U.S. Application No. 62/572,910, filed Oct. 16, 2017; U.S. Application No. 62/577,011, filed Oct. 25, 2017; and U.S. Application No. 62/697,034, filed Jul. 12, 2018. Each of these applications is incorporated herein by reference in its entirety. This application also is related to U.S. application Ser. No. 16/217,360, filed Dec. 12, 2018, now issued as U.S. Pat. No. 10,358,485.

### SEQUENCE LISTING

[0002] This application includes a Sequence Listing submitted electronically as a text file named “104018001204_Sequence Listing.xml”, created on Dec. 8, 2022 with a size of 1,697,466 bytes. The Sequence Listing is incorporated by reference herein.

### TECHNICAL FIELD

[0003] The present invention relates to antibodies that specifically bind Tau and methods of using the same.

### BACKGROUND

[0004] Human Tau is encoded by the microtubule-associated protein Tau gene, MAPT, located on chromosome 17q21. The adult human brain contains six main Tau isoforms which are generated by alternative splicing of exon 2 (E2), E3, and E10. These isoforms differ depending on the number of 29-residue repeat regions near the N-terminus. Tau isoforms containing 0, 1, or 2 inserts are known as ON, IN, and 2N, respectively. Unprocessed Tau isoforms also contain either 3 (“3R”) or 4 (“4R”) microtubule-binding repeat domains. The second of these repeat domains is encoded by E10 and is not included in 3R Tau isoforms (FIG. 1).

[0005] Although Tau is usually highly soluble, under pathological conditions, it can aggregate into paired helical filaments, neurofibrillary tangles and other structures that define a large spectrum of neurodegenerative diseases termed Tauopathies. Tauopathy thus refers to a class of neurodegenerative diseases associated with aggregation of the microtubule-associated protein Tau, including Alzheimer's disease (AD), progressive supranuclear palsy (PSP), and frontotemporal dementia (FTD).

[0006] The underlying mechanism of Tau-mediated neurotoxicity is poorly understood and the trigger for Tau aggregation in neurons is yet to be elucidated. Thus, while therapeutic approaches targeting Tau are being explored, there remains a need for specific and effective therapeutic agents that target Tau.

### SUMMARY

[0007] Provided herein are monoclonal antibodies, or antigen-binding fragments thereof, that specifically bind a human Tau isoform or fragment. In some aspects, the antibody is murine antibody, a chimeric antibody, or a humanized antibody. In some embodiments, the antibody isotype is IgG1. In some embodiments, the antibody comprises: a heavy chain complementarity determining region 1 (HCDR1), a heavy chain complementarity determining region 2 (HCDR2), and a heavy chain complementarity determining region 3 (HCDR3) as set forth in SEQ ID NO: 196 and a light chain complementarity determining region 1 (LCDR1), a light chain complementarity determining region 2 (LCDR2), and a light chain complementarity determining region 3 (LCDR3) as set forth in SEQ ID NO: 411; a HCDR1, a HCDR2, and a HCDR3 as set forth in SEQ ID NO: 268 and a LCDR1, a LCDR2, and a LCDR3 as set forth in SEQ ID NO: 465; or a HCDR1, a HCDR2, and a HCDR3 as set forth in SEQ ID NO: 402 and a LCDR1, a LCDR2, and a LCDR3 as set forth in SEQ ID NO: 572. In some embodiments, the monoclonal antibody or antigen-binding fragment thereof comprises a HCDR1 comprising SEQ ID NO: 594, a HCDR2 comprising SEQ ID NO: 596, a HCDR3 comprising SEQ ID NO: 598, a LCDR1 comprising SEQ ID NO: 738, a LCDR2 comprising SEQ ID NO: 740, and a LCDR3 comprising SEQ ID NO: 742 as defined according to the method of Kabat; a HCDR1 comprising SEQ ID NO: 864, a HCDR2 comprising SEQ ID NO: 866, a HCDR3 comprising SEQ ID NO: 868, a LCDR1 comprising SEQ ID NO: 1008, a LCDR2 comprising SEQ ID NO: 1010, and a LCDR3 comprising SEQ ID NO: 1012 as defined by IMGT; a HCDR1 comprising SEQ ID NO: 642, a HCDR2 comprising SEQ ID NO: 644, a HCDR3 comprising SEQ ID NO: 646, a LCDR1 comprising SEQ ID NO: 774, a LCDR2 comprising SEQ ID NO: 776, and a LCDR3 comprising SEQ ID NO: 778 as defined according to the method of Kabat; a HCDR1 comprising SEQ ID NO: 912, a HCDR2 comprising SEQ ID NO: 914, a HCDR3 comprising SEQ ID NO: 916, a LCDR1 comprising SEQ ID NO: 1044, a LCDR2 comprising SEQ ID NO: 1046, and a LCDR3 comprising SEQ ID NO: 1048 as defined by IMGT; a HCDR1 comprising SEQ ID NO: 732, a HCDR2 comprising SEQ ID NO: 734, a HCDR3 comprising SEQ ID NO: 736, a LCDR1 comprising SEQ ID NO: 846, a LCDR2 comprising SEQ ID NO: 848, and a LCDR3 comprising SEQ ID NO: 850 as defined according to the method of Kabat; or a HCDR1 comprising SEQ ID NO: 1002, a HCDR2 comprising SEQ ID NO: 1004, a HCDR3 comprising SEQ ID NO: 1006, a LCDR1 comprising SEQ ID NO: 1116, a LCDR2 comprising SEQ ID NO: 1118, and a LCDR3 comprising SEQ ID NO: 1120 as defined by IMGT.

[0008] According to some aspects, the aforementioned monoclonal antibodies or antigen-binding fragments thereof comprise sequence modifications. In some embodiments, modification(s) is position 49 of the light chain according to the method of Kabat is not cysteine, the residue at position 57 of the heavy chain according to the method of Kabat is not cysteine, the residue at position 34 of the light chain according to the method of Kabat is glutamate, the residue at position 36 of the light chain according to the method of Kabat is not phenylalanine, the residue at position 46 of the light chain according to the method of Kabat is not arginine, the residue at position 94 of the heavy chain according to the method of Kabat is not lysine, the residue at position 71 of the heavy chain according to the method of Kabat is not arginine, or any combination thereof. In some embodiments in which the residue at position 49 of the light chain according to the method of Kabat is not cysteine, the residue is serine. In some embodiments in which the residue at position 57 of the heavy chain according to the method of Kabat is not cysteine, the residue is serine. In some embodiments in which the residue at position 36 of the light chain according to the method of Kabat is not phenylalanine, the residue is tyrosine. In some embodiments in which the residue at position 46 of the light chain according to the method of Kabat is not arginine, the residue is leucine. In some embodiments in which the residue at position 71 of the heavy chain according to the method of Kabat is not arginine, the residue is valine.

[0009] In some embodiments of the monoclonal antibody or antigen-binding fragment that specifically binds human Tau, the antibody comprises: a heavy chain variable domain (HCVD) comprising SEQ ID NO: 268 and a light chain variable domain (LCVD) comprising SEQ ID NO: 465; a HCVD comprising SEQ ID NO: 268 and a LCVD comprising SEQ ID NO: 581; a HCVD comprising SEQ ID NO: 384 and a LCVD comprising SEQ ID NO: 545; a HCVD comprising SEQ ID NO: 393 and a LCVD comprising SEQ ID NO: 545; a HCVD comprising SEQ ID NO: 402 and a LCVD comprising SEQ ID NO: 545; a HCVD comprising SEQ ID NO: 384 and a LCVD comprising SEQ ID NO: 572; a HCVD comprising SEQ ID NO: 393 and a LCVD comprising SEQ ID NO: 572; or a HCVD comprising SEQ ID NO: 402 and a LCVD comprising SEQ ID NO: 572.

[0010] In some embodiments of the monoclonal antibody or antigen-binding fragment that specifically binds human Tau, the antibody is produced by the cell line having ATCC deposit number PTA-124523 or ATCC deposit number PTA-124524.

[0011] In some embodiments, the antibodies or antigen-binding fragments provided herein bind monomeric wild-type human 2N4R Tau with a K_{D} of less than about 0.5 nM as measured by surface plasmon resonance. In some embodiments, the antibodies or antigen-binding fragments bind human Tau at an epitope comprising the amino acid sequence HVPG (SEQ ID NO: 1133). Also provided are biepitopic antibodies or antigen-binding fragments that bind human Tau at an epitope comprising the amino acid sequence HVPG (SEQ ID NO: 1133) within repeat region 2 or repeat region 4. In certain aspects, the antibodies or antigen-binding fragments bind human Tau at an epitope comprising the amino acid sequence HVPGG (SEQ ID NO: 79). Also provided are biepitopic antibodies or antigen-binding fragments that bind human Tau at an epitope comprising the amino acid sequence HVPGG (SEQ ID NO: 79) within repeat region 2 or repeat region 4. In some embodiments, the monoclonal antibody or antigen-binding fragment binds human Tau at the epitope comprising the amino acid sequence HVPGG (SEQ ID NO: 79) within repeat region 2 and/or repeat region 4 with a binding preference that is at least about 10-fold greater than binding at an epitope comprising the amino acid sequence HKPGG (SEQ ID NO: 182) within repeat region 3 or at an epitope comprising the amino acid sequence HQPGG (SEQ ID NO: 183) within repeat region 1, as determined by a peptide binding assay. In some aspects, the antibodies or antigen-binding fragments provided herein do not bind Tau at an epitope comprising the amino acid sequence HVSGG (SEQ ID NO: 184) within repeat region 2 or at an epitope comprising the amino acid sequence HVLGG (SEQ ID NO: 185) within repeat region 2.

[0012] In some embodiments, the monoclonal antibodies or antigen-binding fragments as provided herein are labeled.

[0013] Further provided are nucleic acid molecules encoding any of the described monoclonal antibodies or antigen-binding fragments, vectors comprising the nucleic acid molecules, cells that express the nucleic acid molecules, and methods of producing the anti-Tau antibodies or antigen-binding fragments by culturing such cells under conditions suitable for production thereof. The methods of producing may further involve recovery of the antibody or antigen-binding fragment.

[0014] Also provided herein are pharmaceutical compositions of any of the described monoclonal antibodies, or antigen-binding fragments thereof, that specifically bind a human Tau and a pharmaceutically acceptable carrier.

[0015] Methods of use of the described monoclonal antibodies, or antigen-binding fragments thereof, that specifically bind a human Tau also are provided herein. In some embodiments, the antibodies or antigen-binding fragments that specifically bind a human Tau are for use as a medicament. In some aspects, the antibodies or antigen-binding fragments that specifically bind a human Tau are for use in the treatment of a Tauopathy or in the preparation of a medicament for the treatment of a Tauopathy. Methods of treating a Tauopathy in a subject also are provided. In some embodiments, the methods of treating a Tauopathy involve administering to the subject any of the described monoclonal antibodies, or antigen-binding fragments thereof, that specifically bind a human Tau under conditions effective to treat the Tauopathy in the subject. In some aspects, the Tauopathy is Alzheimer's disease, frontotemporal dementia, or progressive supranuclear palsy. The frontotemporal dementia may be Pick's Disease, for example.

[0016] Further provided are methods for decreasing sarkosyl-insoluble Tau levels in a subject by administering to the subject any of the described monoclonal antibodies, or antigen-binding fragments thereof, that specifically bind a human Tau. Also provided are methods for inhibiting Tau aggregation in a subject by administering to the subject any of the described monoclonal antibodies, or antigen-binding fragments thereof, that specifically bind a human Tau. The methods may be performed in vitro or in vivo.

### BRIEF DESCRIPTION OF THE DRAWINGS

[0017] FIG. 1 illustrates the six isoforms of Tau expressed in adult human brain: 2N4R (UniProt Acc. No. P10636-8); 1N4R (UniProt Acc. No. P10636-7); 0N4R (UniProt Acc. No. P10636-6); 2N3R (UniProt Acc. No. P10636-5); 1N3R (UniProt Acc. No. P10636-4); and 0N3R (UniProt Acc. No. P10636-2) (Spillantini & Goedert, The Lancet, 2013, 12(6): 609-622).

[0018] FIG. 2 illustrates the region of protein (“Peptide antigen”) selected to generate the anti-Tau antibodies described herein. FIG. 2 discloses SEQ ID NOS. 1137, 1138 and 1138, respectively, in order of appearance.

[0019] FIGS. 3A and 3B illustrate the results of the fine epitope mapping of the murine 7G6 (“ms7G6”) anti-Tau antibody. For FIG. 3A, translated overlapping peptides (SEQ ID NOs: 1-37, respectively) of the wild-type 2N4R Tau sequence were synthesized and printed onto a glass chip along with a control HA-tag peptide. ms7G6 antibody binding (signal in figure interior) and the control peptide (signal on figure periphery) was detected as described in the methods. FIG. 3B shows spot intensity as a result of antibody binding to the peptide chip, quantified by the LI-COR Odyssey™ and Pepslide™ Analyser software packages. Fluorescence intensity was then plotted against peptide sequence to generate the epitope mapping data. FIG. 3B discloses SEQ ID NOS 1139-1140 and 1-37, respectively, in order of appearance.

[0020] FIG. 4 illustrates the results of the murine 7G6 antibody epitope substitution scanning of the peptide sequence KDNIKHVPGGGSVQI (SEQ ID NO: 26), corresponding to amino acids 294 to 308 of the human 2N4R Tau protein. Each amino acid position of the peptide was replaced by every naturally occurring amino acid possible, printed onto a glass chip, and probed with the ms7G6 antibody. FIG. 4 illustrates the results for select peptides (SEQ ID NOs 38-78, respectively). While ms7G6 antibody binding allows some variation in the second position (valine) of SEQ ID NO: 79, antibody binding is completely dependent on the proline residue of SEQ ID NO: 79. No binding of antibody 7G6 to KDNIKHVSGGGSVQI (SEQ ID NO: 59) was observed. The latter is the sequence present in Tau P301S mutant protein.

[0021] FIGS. 5A and 5B illustrate the degree and rate of heparin-induced aggregation for the wild-type and P301S Tau proteins, respectively, in the presence and absence of ms7G6 (“7G6”) anti-Tau antibody. Mouse IgG that is unable to bind Tau was included as a control antibody.

[0022] FIGS. 6A, 6B, 6C, and 6D illustrate the effects of vehicle control, human IgG1k, murine 7G6 anti-Tau antibody, and humanized 7G6-HCzu25-LCzu18 antibody, respectively, in an in vitro cell-based model of Tau seeding and aggregation.

[0023] FIG. 7 illustrates the results of pre-incubation of recombinant human P301S Tau seeds with either vehicle, mouse IgG control antibody, and murine anti-Tau antibodies 1F1, 7G6, or 8E5 in a preclinical in vivo Tau seeding model.

[0024] FIG. 8 illustrates the time course of insoluble Tau development in the hippocampus and cortex of P301S transgenic mice that were ICV-injected with recombinant P301S Tau seeds.

[0025] FIG. 9 illustrates the effect of peripheral, single repeat dosing of ms7G6 antibody in the P301S in vivo seeding model. ms7G6 caused a reduction in insoluble Tau levels in hippocampus and cortex.

[0026] FIG. 10 illustrates the effect of peripheral multiple repeat dosing of ms7G6 antibody in the P301S in vivo seeding model. Reduction of insoluble Tau levels by antibody 7G6 was dose-dependent.

[0027] FIG. 11 illustrates the closest homologous human germline sequences to murine anti-Tau antibody ms7G6. ms7G6 and homologous human germline sequences were aligned. The Vh and VK domains are annotated by the IMGT and Kabat numbering systems. Identical residues are represented as a “.” in the human germline sequences. FIG. 11 discloses SEQ ID NOS 1141-1144, 1143, 1145, 1143, 1146-1149, 1148, 1150 and 1148, respectively, in order of appearance.

[0028] FIG. 12 compares the sequences of ms7G6 antibody heavy and light chain to humanized 7G6 Vh1 and Vk2 variants. The murine 7G6 and humanized 7G6 variants were aligned. The Vh and Vk domains are annotated by the IMGT and Kabat numbering systems. Mutations are underlined. FIG. 12 discloses SEQ ID NOS 1151-1174, respectively, in order of appearance.

[0029] FIGS. 13A, 13B, 13C, 13D, 13E, and 13F illustrate Tau binding by ELISA with 7G6 LCzu1 humanized variants (FIG. 13A), 7G6 LCzu2 humanized variants (FIG. 13B), 7G6 LCzu3 humanized variants (FIG. 13C), 7G6 LCzu4 humanized variants (FIG. 13D), 7G6 LCzu5 humanized variants (FIG. 13E), and 7G6 humanized variants with Ser substituted for Cys49 (according to Kabat) on the light chain and Cys57 (according to Kabat) on the heavy chain (FIG. 13F).

[0030] FIG. 14 illustrates the results of Tau binding by humanized 7G6 Vh1/Vk2 variants analyzed by a direct ELISA. Samples were incubated for 1 h at room temperature in 96-well plates coated with 2N4R Tau. Plates were washed and then HRP-conjugated anti-mouse or anti-human antibodies were added to the wells. The amount of HRP activity in each well was measured by QuantaBlu™ fluorescent substrate and the relative fluorescence units (RFUs) were detected by a SpectraMax M5 plate reader. The majority of the mAbs showed little difference in Tau binding in a direct ELISA assay. The notable exception was 7G6-LCzu9 which exhibited no binding, even at the highest concentrations. In addition, 7G6-LCzu22 showed reduced binding; Vκ Tyr36 in combination with Arg46 resulted in disruption of the antigen binding site.

[0031] FIG. 15 illustrates results of the SDS-PAGE analysis of heavy chain and light chain stability for the Vh1 and Vκ2 humanized 7G6 variants. Two micrograms of each mAb were mixed with 4× NuPAGE™ LDS Sample Buffer in the absence of reducing agent and loaded onto a 4-12% Bis-Tris SDS-PAGE gel in MOPS buffer. Gels were stained with InstantBlue™ and destained in water. HC-HC-LC trimers (HHL), HC-HC dimers (HH), and free LC (L) are indicated by arrows. The molecular weight of the markers is indicated in kDa.

[0032] FIG. 16 illustrates the BLAST alignment of antibody ms7G6 (“7G6”) to the human germline database at www_ncbi_nlm_nih_gov/igblast/. The Vh and Vk domains are annotated by the IMGT and Kabat numbering systems. FIG. 16 discloses SEQ ID NOS 1175-1178, 1177, 1179, 1180-1183, 1182 and 1184, respectively, in order of appearance.

[0033] FIG. 17 illustrates an alignment of ms7G6 and humanized 7G6 Vh3Nk1 variants. The Vh and VK domains are annotated by the IMGT and Kabat numbering systems. Mouse and humanized 7G6 variants were aligned. The Vh and VK domains are annotated by the IMGT and Kabat numbering systems. Mutations are underlined. FIG. 17 discloses SEQ ID NOS 1185-1207, respectively, in order of appearance.

[0034] FIG. 18 demonstrates direct binding of Tau by ms7G6 and humanized 7G6Vh3/Vκ1 variants 7G6-HCzu11-LCzu11 (“HCzu11-LCzu11”), 7G6-HCzu11-LCzu12 (“HCzu11-LCzu12”), 7G6-HCzu12-LCzu11 (“HCzu12-LCzu11”), and 7G6-HCzu12-LCzu12 (“HCzu12-LCzu12”). Samples were incubated for 1 h at room temperature in 96-well plates coated with 2N4R wild-type recombinant Tau protein. After washing, HRP-conjugated anti-mouse or anti-human antibodies were added to the wells. The amount of HRP activity in each well was measured by QuantaBlu™ fluorescent substrate and the RFUs were detected by a SpectraMax M5 plate reader.

[0035] FIGS. 19A and 19B demonstrate direct binding of Tau by ms7G6, non-Tau binding IgG1 control Ab mAb2, and humanized 7G6 Vh3/Vκ1 variants. FIG. 19A demonstrates direct binding of Tau by ms7G6, non-Tau binding IgG1 control Ab mAb2, and humanized 7G6 Vh3/Vκ1 variants 7G6-HCzu12-LCzu12 (“HCzu12-LCzu12”), 7G6-HCzu13-LCzu12 (“HCzu13-LCzu12”), 7G6-HCzu14-LCzu12 (“HCzu14-LCzu12”), 7G6-HCzu15-LCzu12 (“HCzu15-LCzu12”), 7G6-HCzu16-LCzu12 (“HCzu16-LCzu12”), 7G6-HCzu17-LCzu12 (“HCzu17-LCzu12”), 7G6-HCzu18-LCzu12 (“HCzu18-LCzu12”), 7G6-HCzu19-LCzu12 (“HCzu19-LCzu12”), and 7G6-HCzu20-LCzu12 (“HCzu20-LCzu12”). FIG. 19B demonstrates direct binding of Tau by ms7G6, non-Tau binding IgG1 control Ab mAb2, and humanized 7G6 Vh3/Vκ1 variants 7G6-HCzu12-LCzu12 (“HCzu12-LCzu12”), 7G6-HCzu12-LCzu13 (“HCzu12-LCzu13”), 7G6-HCzu12-LCzu14 (“HCzu12-LCzu14”), 7G6-HCzu12-LCzu15 (“HCzu12-LCzu15”), 7G6-HCzu12-LCzu16 (“HCzu12-LCzu16”), and 7G6-HCzu12-LCzu17 (“HCzu12-LCzu17”). Samples were incubated for 1 hour at room temperature in 96-well plates coated with 2N4R wild-type recombinant Tau protein. After the plates were washed, HRP-conjugated anti-mouse or anti-human detection antibodies were added to the wells. The amount of HRP activity in each well was measured by QuantaBlu™ fluorescent substrate and the RFUs were detected by a SpectraMax M5 plate reader.

[0036] FIGS. 20A, 20B, and 20C illustrate the results of the non-reducing SDS-PAGE analysis of heavy chain/light chain stability for Vh3 and Vκ1 variants of antibody 7G6.

[0037] FIG. 20A illustrates the results of the SDS-PAGE analysis of heavy chain/light chain stability for Vh3 and Vκ1 variants 7G6-HCzu11-LCzu11 (“HCzu11-LCzu11”), 7G6-HCzu11-LCzu12 (“HCzu11-LCzu12”), 7G6-HCzu12-LCzu11 (“HCzu12-LCzu11”), and 7G6-HCzu12-LCzu12 (“HCzu12-LCzu12”). FIG. 20B illustrates the results of the SDS-PAGE analysis of heavy chain/light chain stability for Vh3 and Vκ1 variants 7G6-HCzu12-LCzu12 (“HCzu12-LCzu12”), 7G6-HCzu13-LCzu12 (“HCzu13-LCzu12”), 7G6-HCzu14-LCzu12 (“HCzu14-LCzu12”), 7G6-HCzu16-LCzu12 (“HCzu16-LCzu12”), 7G6-HCzu17-LCzu12 (“HCzu17-LCzu12”), and 7G6-HCzu18-LCzu12 (“HCzu18-LCzu12”). FIG. 20C illustrates the results of the SDS-PAGE analysis of heavy chain/light chain stability for Vh3 and Vκ1 variants 7G6-HCzu12-LCzu19 (“HCzu12-LCzu19”), 7G6-HCzu12-LCzu13 (“HCzu12-LCzu13”), 7G6-HCzu12-LCzu14 (“HCzu12-LCzu14”), 7G6-HCzu12-LCzu15 (“HCzu12-LCzu15”), 7G6-HCzu12-LCzu16 (“HCzu12-LCzu16”), and 7G6-HCzu12-LCzu17 (“HCzu12-LCzu17”). Two micrograms of each mAb were mixed with 4×NuPAGE™ LDS Sample Buffer in the absence of reducing agent and loaded onto a 4-12% Bis-Tris SDS-PAGE gel in MOPS buffer. Gels were stained with InstantBlue™ and destained in water. HC-LC dimers (HL) and free HC are indicated by arrows. The molecular weight markers are indicated in kDa.

[0038] FIGS. 21A and 21B illustrate the results of SEC-HPLC analysis to assess the homogeneity of antibody 7G6 humanized variants 7G6-HCzu8-LCzu6 (FIG. 21A) and 7G6-HCzu25-LCzu18 (FIG. 21B) in solution. Five micrograms of mAb 7G6 humanized variant were injected into an Agilent 1260 Infinity with an AdvanceBio SEC 300A 2.7 um 4.6×50 Guard column, and AdvanceBio SEC 300A 2.7 um 4.6×300 mm column. Samples were analyzed in sodium phosphate buffer, pH 6.5 at a flow rate of 0.35 mL/min, and the absorbance at 280 nm was analyzed. Representative data for mAb 7G6-HCzu8-LCzu6 or 7G6-HCzu25-LCzu18 are shown.

[0039] FIGS. 22A-L illustrate the thermal melting curves of F(ab′)2 fragments that were analyzed by differential scanning calorimetry (DSC). FIGS. 22A-L show the thermal melting curves for mAb1 (FIG. 22A), mAb2 (FIG. 22B), chimeric (“xi”) 7G6 (“xi7G6”) (FIG. 22C), 7G6-HCzu8-LCzu6 (FIG. 22D), 7G6-HCzu8-LCzu21 (FIG. 22E), 7G6-HCzu23-LCzu15 (FIG. 22F), 7G6-HCzu24-LCzu15 (FIG. 22G), 7G6-HCzu25-LCzu15 (FIG. 22H), 7G6-HCzu23-LCzu18 (FIG. 22I), 7G6-HCzu24-LCzu18 (FIG. 22J), 7G6-HCzu25-LCzu18 (FIG. 22K), and 7G6-HCzu8-LCzu6 (FIG. 22L). F(ab′)2 fragments and controls were subjected to thermal analysis ranging from 25-100° C. using a scan rate of 100° C./hour. The profiles of the chimeric, 7G6-HCzu8 and 7G6-HCzu25 F(ab′)2 were similar to non-Tau-binding IgG1 control mAb 1 and mAb2. 7G6-HCzu23 and 7G6-HCzu24, however, contained a second peak, indicating instability of the F(ab′)2 fragment, possibly the dissociation of the HC-LC interaction. The transition midpoints of 7G6-HCzu8-LCzu21, 7G6-HCzu25-LCzu15, and 7G6-HCzu25-LCzu18 were similar, ranging from 77.4 to 77.6° C. The midpoint of 7G6-HCzu8-LCzu6 was one degree higher at 78.6° C.

[0040] FIGS. 23A and 23B show results of the immunoreactive T cell epitope analysis, providing putative hotspots (SEQ ID NOs: 80-94 in FIG. 23A; SEQ ID NOs: 95-111 in FIG. 23B) in humanized antibody 7G6 heavy chains. The peptides in the tables were identified as having identity 5% or less identity to human germline sequences. The percent homology of the peptides to variable domain germline sequences was also taken into consideration. Peptides with ˜5% or less homology to variable region germline sequences and/or were predicted to bind three or more HLA alleles were identified as higher risk (highlighted in gray).

[0041] FIGS. 24A-24D show results of the immunoreactive T cell epitope analysis, providing putative hotspots in humanized antibody 7G6 light chains (SEQ ID NOs: 112-130 in FIG. 24A; SEQ ID NOs: 131-150 in FIG. 24B; SEQ ID NOs: 151-165 in FIG. 24C; and SEQ ID NOs: 166-180 in FIG. 24D). The peptides in the tables were identified as having identity 5% or less identity to human germline sequences. The percent homology of the peptides to variable domain germline sequences was also taken into consideration. Peptides with ˜5% or less homology to variable region germline sequences and/or were predicted to bind three or more HLA alleles were identified as higher risk (highlighted in gray).

[0042] FIG. 25 shows images of immunohistochemical staining of AD, PSP, and PiD tissue samples with antibody 7G6-HCzu25-LCzu18. Antibody 7G6-HCzu25-LCzu18 strongly and specifically recognizes pathological Tau (depicted by black arrows in each image) in human post-mortem diseased brain.

[0043] FIGS. 26A and 26B show the results of fine epitope mapping for humanized antibodies 7G6-HCzu8/LCzu6 and 7G6-HCzu25/LCzu18, respectively. Fluorescent images of the chips and resulting intensity plots show that the 7G6-HCzu8/LCzu6 (FIG. 26A) and 7G6-HCzu25/LCzu18 (FIG. 26B) antibodies both bind to two major sites on the full length Tau protein. FIG. 26A discloses SEQ ID NOS 1-37, respectively, in order of appearance. FIG. 26B discloses SEQ ID NOS 1-37, respectively, in order of appearance.

[0044] FIG. 27 illustrates the degree and rate of heparin-induced aggregation for the wild-type 2N4R Tau protein in the presence and absence of antibody 7G6-HCzu25-LCzu18. Recombinant wild-type 2N4R Tau was induced to aggregate under the conditions described in Example 15. Reactions contained either no antibody (buffer only; open triangle), a human IgG1 control antibody (solid diamond), or antibody 7G6-HCzu25-LCzu18 (open circle). Thioflavin S (ThS) fluorescence was measured immediately after heparin addition (day 0) and then on days 1, 2, 5 and 6 thereafter. Data is represented as mean±SD from four independent experiments. Statistical analysis (multiple t-tests comparing IgG control and antibody 7G6-HCzu25-LCzu18) was performed for each time point (p≤0.01 **; p≤0.001 ***). FIG. 27 shows that 7G6-HCzu25-LCzu18 antibody effectively inhibits Tau aggregation in vitro. The effect was statistically significant when comparing the IgG control and 7G6-HCzu25-LCzu18 antibody for days 1, 2, 5 and 6 following incubation at 37° C. No significance was observed on day 0 just after the reactions were initiated following heparin addition.

[0045] FIG. 28 illustrates the degree and rate of heparin-induced aggregation for the wild-type 2N4R Tau protein in the presence and absence of antibody 7G6 or antibody 7G6-HCzu25-LCzu18. Recombinant wild-type 2N4R Tau was induced to aggregate under the conditions described in the materials and methods. Reactions contained either no antibody (buffer only; open triangle); a human IgG1 control antibody (solid diamond); antibody 7G6 (solid square); or antibody 7G6-HCzu25-LCzu18 (open circle). Thioflavin S (ThS) fluorescence was measured immediately after heparin addition (day 0) and then on days 1, 2, 5 and 6 thereafter. FIG. 28 shows that, when both antibody 7G6 and antibody 7G6-HCzu25-LCzu18 were tested according to the assay conditions provided in Example 5, both antibodies effectively inhibited Tau aggregation in vitro. The same effect size was seen between 7G6 and 7G6-HCzu25-LCzu18 antibodies.

[0046] FIG. 29 shows the normalized ThS positive rate in a K18 fibril cell-based seeding assay after immunodepletion of samples with 7G6-HCzu25-LCzu18 antibody. 1.5 and 15 μg/ml of 7G6-HCzu25-LCzu18 antibody removed seeding effects of K18 fibril (>70% reduction vs human IgG1 kappa control).

[0047] FIGS. 30A-30D illustrate the effect of antibody 7G6 on brain sarkosyl-insoluble Tau induced by intra-hippocampal Tau seed injection in human P301S Tau transgenic mice. Tau seed or non-seed (100 mmol/L sodium acetate, pH7.0) was stereotaxically injected into the left hippocampus. 7G6 or control IgG at 40 mg/kg was intraperitonealy administered once weekly for 3 weeks. Control IgG=Mouse IgG2b isotype control antibody, 7G6=Anti-human Tau mouse IgG2b monoclonal antibody Data represent the mean±SEM (n=6 for Non-Seed, n=11 for Control IgG, 7G6). **** P<0.0001, * P<0.05 versus control IgG (analyzed by 1-way ANOVA followed by Fisher's LSD test). The intraperitoneal administration of 7G6 once weekly for 3 weeks at 40 mg/kg produced significant suppression of the increase of sarkosyl-insoluble Tau in the contralateral hippocampus induced by intra-hippocampal Tau seed injection in P301S Tau transgenic mice.

[0048] FIGS. 31A and 31B show MTBR-Tau in cerebrospinal fluid from cynomolgus monkey treated with 7G6-HCzu25-LCzu18 antibody. FIG. 31A shows bound MTBR-Tau. FIG. 31B shows free MTBR-Tau. Mean±SEM. Male Cynomolgus monkey N=3 (Vehicle, 10 mg/kg, 30 mg/kg, 100 mg/kg).

[0049] FIG. 32 shows bound MTBR-Tau in human cerebrospinal fluid spiked with 7G6-HCzu25-LCzu18 antibody (10, 100, 500, 1000 and 2000 ng/mL).

[0050] FIGS. 33A and 33B show the efficacy of Tau monomer or fibril uptake, respectively, in CHO cells overexpressing CD32A. 7G6-HCzu25-LCzu18 antibody (3 μg/mL) significantly increased Tau monomer uptake compared to human IgG1 control (3 μg/mL) (FIG. 33A). Likewise, 7G6-HCzu25-LCzu18 antibody (0.3 and 3 μg/mL) also significantly increased Tau fibril uptake compared to human IgG1 control (3 μg/mL) (FIG. 33B). In both cases, FcR inhibitor treatment significantly blocked the effect of 7G6-HCzu25-LCzu18 antibody-induced Tau uptake in this cell assay system.

### DETAILED DESCRIPTION OF ILLUSTRATIVE EMBODIMENTS

[0051] The following description characterizes antibodies, and antigen-binding fragments thereof, that specifically bind to Tau. Also described are related polynucleotides capable of encoding these antibodies and antigen-binding fragments, cells expressing the antibodies and antigen-binding fragments, as well as associated vectors. In addition, methods of using the antibodies and antigen-binding fragments are described. For example, the provided antibodies, and antigen-binding fragments, may be used to treat a Tauopathy in a subject.

[0052] Various terms relating to aspects of the description are used throughout the specification and claims. Such terms are to be given their ordinary meaning in the art unless otherwise indicated. Other specifically defined terms are to be construed in a manner consistent with the definitions provided herein.

[0053] As used in this specification and the appended claims, the singular forms “a,” “an,” and “the” include plural referents unless the content clearly dictates otherwise. Thus, for example, reference to “a cell” includes a combination of two or more cells, and the like.

[0054] The term “about” as used herein when referring to a measurable value such as an amount, a temporal duration, and the like, is meant to encompass variations of up to ±10% from the specified value, as such variations are appropriate to perform the disclosed methods. Unless otherwise indicated, all numbers expressing quantities of ingredients, properties such as molecular weight, reaction conditions, and so forth used in the specification and claims are to be understood as being modified in all instances by the term “about.” Accordingly, unless indicated to the contrary, the numerical parameters set forth in the following specification and attached claims are approximations that may vary depending upon the desired properties sought to be obtained by the present invention. At the very least, and not as an attempt to limit the application of the doctrine of equivalents to the scope of the claims, each numerical parameter should at least be construed in light of the number of reported significant digits and by applying ordinary rounding techniques.

[0055] Notwithstanding that the numerical ranges and parameters setting forth the broad scope of the invention are approximations, the numerical values set forth in the specific examples are reported as precisely as possible. Any numerical value, however, inherently contain certain errors necessarily resulting from the standard deviation found in their respective testing measurements.

[0056] “Isolated” means a biological component (such as a nucleic acid, peptide or protein) has been substantially separated, produced apart from, or purified away from other biological components of the organism in which the component naturally occurs, i.e., other chromosomal and extrachromosomal DNA and RNA, and proteins. Nucleic acids, peptides and proteins that have been “isolated” thus include nucleic acids and proteins purified by standard purification methods. “Isolated” nucleic acids, peptides and proteins that can be part of a composition and still be isolated if such composition is not part of the native environment of the nucleic acid, peptide, or protein. The term also embraces nucleic acids, peptides and proteins prepared by recombinant expression in a host cell as well as chemically synthesized nucleic acids.

[0057] “Polynucleotide,” synonymously referred to as “nucleic acid molecule” or “nucleic acids,” refers to any polyribonucleotide or polydeoxyribonucleotide, which may be unmodified RNA or DNA or modified RNA or DNA. “Polynucleotides” include, without limitation single- and double-stranded DNA, DNA that is a mixture of single- and double-stranded regions, single- and double-stranded RNA, and RNA that is mixture of single- and double-stranded regions, hybrid molecules comprising DNA and RNA that may be single-stranded or, more typically, double-stranded or a mixture of single- and double-stranded regions. “Polynucleotide” also embraces relatively short nucleic acid chains, often referred to as oligonucleotides.

[0058] The meaning of “substantially the same” can differ depending on the context in which the term is used. Because of the natural sequence variation likely to exist among heavy and light chains and the genes encoding them, one would expect to find some level of variation within the amino acid sequences or the genes encoding the antibodies or antigen-binding fragments described herein, with little or no impact on their unique binding properties (e.g., specificity and affinity). Such an expectation is due in part to the degeneracy of the genetic code, as well as to the evolutionary success of conservative amino acid sequence variations, which do not appreciably alter the nature of the encoded protein. Accordingly, in the context of nucleic acid sequences, “substantially the same” means at least 65% identity between two or more sequences. Preferably, the term refers to at least 70% identity between two or more sequences, more preferably at least 75% identity, more preferably at least 80% identity, more preferably at least 85% identity, more preferably at least 90% identity, more preferably at least 91% identity, more preferably at least 92% identity, more preferably at least 93% identity, more preferably at least 94% identity, more preferably at least 95% identity, more preferably at least 96% identity, more preferably at least 97% identity, more preferably at least 98% identity, and more preferably at least 99% or greater identity. Such identity may be determined using nBLAST algorithm (Altschul et al., (1990) Proc. Natl. Acad. Sci. USA 87:2264-8; Karlin and Altschul (1993) Proc. Natl. Acad. Sci. USA 90:5873-7).

[0059] The degree of variation that may occur within the amino acid sequence of a protein without having a substantial effect on protein function is much lower than that of a nucleic acid sequence, since the same degeneracy principles do not apply to amino acid sequences. Accordingly, in the context of an antibody or antigen-binding fragment, “substantially the same” means the sequences have “insubstantial differences”. Insubstantial differences are substitutions of 1, 2, 3, 4, 5 or 6 amino acids in an antibody or antibody fragment amino acid sequence. Amino acid sequences substantially the same as the sequences disclosed herein are also part of this application. In some embodiments, the sequence identity can be about 90%, 91%, 92%, 93%, 94%, 95%, 96%, 97%, 98%, 99% or higher. Other embodiments include Tau-specific antibodies, or antigen-binding fragments, that have framework, scaffold, or other non-binding regions that do not share significant identity with the antibodies and antigen-binding fragments described herein, but do incorporate one or more CDRs or other sequences needed to confer binding that are 90%, 91%, 92%, 93%, 94%, 95%, 96%, 97%, 98%, or 99% identical to such sequences described herein.

[0060] A “vector” is a replicon, such as plasmid, phage, cosmid, or virus in which another nucleic acid segment may be operably inserted so as to bring about the replication or expression of the segment.

[0061] The terms “express” and “produce” are used synonymously herein, and refer to the biosynthesis of a gene product. These terms encompass the transcription of a gene into RNA. These terms also encompass translation of RNA into one or more polypeptides, and further encompass all naturally occurring post-transcriptional and post-translational modifications. The expression or production of an antibody or antigen-binding fragment thereof may be within the cytoplasm of the cell, or into the extracellular milieu such as the growth medium of a cell culture.

[0062] The term “treating” or “treatment” refers to any success or indicia of success in the attenuation or amelioration of an injury, pathology or condition, including any objective or subjective parameter such as abatement, remission, diminishing of a symptom or making the condition more tolerable to the patient, slowing in the rate of degeneration or decline, making the final point of degeneration less debilitating, improving a subject's physical or mental well-being, or prolonging the length of survival. The treatment may be assessed by objective or subjective parameters; including the results of a physical examination, neurological examination, or psychiatric evaluations. In a particular embodiment, the symptom of a Tauopathy is an impairment in cognition. In a specific embodiment, the symptom of a Tauopathy is an impairment in learning and/or memory. In a specific embodiment, the symptom of a Tauopathy is a long-term memory loss. In a specific embodiment, the symptom of a Tauopathy is dementia. In some embodiments, the symptom of a Tauopathy is confusion, irritability, aggression, mood swings, or a language impairment. In some embodiments, the symptom of a Tauopathy is an impairment or loss of one or more cognitive functions such as reasoning, situational judgment, memory capacity, and/or learning.

[0063] The term “antibody” as used herein is meant in a broad sense and includes immunoglobulin or antibody molecules including polyclonal antibodies, monoclonal antibodies including murine, human, human-adapted, humanized and chimeric monoclonal antibodies and antibody fragments. In general, antibodies are proteins or peptide chains that exhibit binding specificity to a specific antigen. Intact antibodies are heterotetrameric glycoproteins, composed of two identical light chains and two identical heavy chains. Typically, each light chain is linked to a heavy chain by one covalent disulfide bond, while the number of disulfide linkages varies between the heavy chains of different immunoglobulin isotypes. Each heavy and light chain also has regularly spaced intrachain disulfide bridges. Each heavy chain has at one end a variable domain (variable region) (VH) followed by a number of constant domains (constant regions). Each light chain has a variable domain at one end (VL) and a constant domain at its other end; the constant domain of the light chain is aligned with the first constant domain of the heavy chain and the light chain variable domain is aligned with the variable domain of the heavy chain. Antibody light chains of any vertebrate species can be assigned to one of two clearly distinct types, namely kappa (κ) and lambda (λ), based on the amino acid sequences of their constant domains.

[0064] Immunoglobulins can be assigned to five major classes or isotypes, depending upon the type of constant domain possessed by its heavy chain, namely IgA, IgD, IgE, IgG and IgM, depending on the heavy chain constant domain amino acid sequence. IgA and IgG are further sub-classified as the isotypes IgA1, IgA2, IgG1, IgG2, IgG3 and IgG4. The heavy chain constant domains that correspond to the different classes of immunoglobulins are called a, 6, £, y, and 11, respectively.

[0065] An immunoglobulin light chain variable region or heavy chain variable region consists of a “framework” region interrupted by three “antigen-binding sites”. The antigen-binding sites are defined using various terms as follows: (i) the term Complementarity Determining Regions (CDRs) is based on sequence variability (Wu and Kabat, J. Exp. Med. 132:211-250, 1970). Generally, the antigen-binding site has six CDRs; three in the VH (HCDR1, HCDR2, HCDR3), and three in the VL (LCDR1, LCDR2, LCDR3) (Kabat et al., Sequences of Proteins of Immunological Interest, 5th Ed. Public Health Service, National Institutes of Health, Bethesda, Md., 1991). The “IMGT-CDRs” as proposed by Lefranc (Lefranc et al., Dev. Comparat. Immunol. 27:55-77, 2003) are based on the comparison of V domains from immunoglobulins and T-cell receptors. The International ImMunoGeneTics (IMGT) database (www_imgt_org) provides a standardized numbering and definition of these regions. The correspondence between CDRs and IMGT delineations is described in Lefranc et al., Dev. Comparat. Immunol. 27:55-77, 2003.

[0066] Antigen-binding fragments are any proteinaceous structure that may exhibit binding affinity for a particular antigen. Some antigen-binding fragments are composed of portions of intact antibodies that retain antigen-binding specificity of the parent antibody molecule. For example, antigen-binding fragments may comprise at least one variable region (either a heavy chain or light chain variable region) or one or more CDRs of an antibody known to bind a particular antigen. Examples of suitable antigen-binding fragments include, without limitation diabodies and single-chain molecules as well as Fab, F(ab′)2, Fc, Fabc, and Fv molecules, single chain (Sc) antibodies, individual antibody light chains, individual antibody heavy chains, chimeric fusions between antibody chains or CDRs and other proteins, protein scaffolds, heavy chain monomers or dimers, light chain monomers or dimers, dimers consisting of one heavy and one light chain, and the like. All antibody isotypes may be used to produce antigen-binding fragments. Additionally, antigen-binding fragments may include non-antibody proteinaceous frameworks that may successfully incorporate polypeptide segments in an orientation that confers affinity for a given antigen of interest, such as protein scaffolds. Antigen-binding fragments may be recombinantly produced or produced by enzymatic or chemical cleavage of intact antibodies. The phrase “an antibody or antigen-binding fragment thereof” may be used to denote that a given antigen-binding fragment incorporates one or more amino acid segments of the antibody referred to in the phrase.

[0067] “Specific binding” or “specifically binds” refers to the binding of an antibody or antigen-binding fragment to an antigen with greater affinity than for other antigens. Typically, the antibody or antigen-binding fragment binds to the antigen with an equilibrium dissociation constant K_{D} of about 5×10⁻⁸ M or less, for example about 5×10⁻⁹ M or less, about 1×10⁻⁹ M or less, about 1×10⁻¹⁰ M or less, or about 1×10⁻¹¹ M or less.

[0068] “Biepitopic” when used in the context of antibodies or antibody fragments refers to the ability of the antibody or fragment to specifically bind to two non-overlapping epitopes on the same target antigen molecule though not necessarily simultaneously.

[0069] The term “subject” refers to human and non-human animals, including all vertebrates, e.g., mammals and non-mammals, such as non-human primates, mice, rabbits, sheep, dogs, cats, horses, cows, chickens, amphibians, and reptiles. In many embodiments of the described methods, the subject is a human.

[0070] The embodiments described herein are not limited to particular methods, reagents, compounds, compositions or biological systems, which can, of course, vary.

[0071] Described herein are isolated monoclonal antibodies and antigen-binding fragments that specifically bind Tau, preferably human Tau (“anti-Tau antibodies”). Human Tau 2N4R (also referred to as Tau441) is set forth herein as SEQ ID NO: 181:

MAEPRQEFEV MEDHAGTYGL GDRKDQGGYT MHQDQEGDTD
AGLKESPLQT PTEDGSEEPG SETSDAKSTP TAEDVTAPLV
DEGAPGKQAA AQPHTEIPEG TTAEEAGIGD TPSLEDEAAG
HVTQARMVSK SKDGTGSDDK KAKGADGKTK IATPRGAAPP
GQKGQANATR IPAKTPPAPK TPPSSGEPPK SGDRSGYSSP
GSPGTPGSRS RTPSLPTPPT REPKKVAVVR TPPKSPSSAK
SRLQTAPVPM PDLKNVKSKI GSTENLKHQP GGGKVQIINK
KLDLSNVQSK CGSKDNIKHV PGGGSVQIVY KPVDLSKVTS
KCGSLGNIHH KPGGGQVEVK SEKLDFKDRV QSKIGSLDNI
THVPGGGNKK IETHKLTFRE NAKAKTDHGA EIVYKSPVVS
GDTSPRHLSN VSSTGSIDMV DSPQLATLAD EVSASLAKQG L.

[0072] Human Tau also refers to Tau variants, for example, naturally occurring allelic variants, including those illustrated in FIG. 1 [2N4R (UniProt Acc. No. P10636-8); 1N4R (UniProt Acc. No. P10636-7); 0N4R (UniProt Acc. No. P10636-6); 2N3R (UniProt Acc. No. P10636-5); 1N3R (UniProt Acc. No. P10636-4); and 0N3R (UniProt Acc. No. P10636-2)], or sequences containing at least one amino acid substitution relative thereto. In some embodiments, the antibodies or antigen-binding fragments are murine IgG, or derivatives thereof. While the anti-Tau antibodies or antigen-binding fragments may be human, humanized, or chimeric, the antibodies or antigen-binding fragments exemplified herein are murine and humanized antibodies.

[0073] In any of the embodiments described herein, the antibody that specifically binds Tau is preferably IgGl, more preferably human IgG1. The antibodies and antigen-binding fragments that specifically bind Tau as disclosed in the examples section are derived from mice. Similar antibodies may be derived from any species by recombinant means. For example, the antibodies or antigen-binding fragments may be chimeric rat, goat, horse, swine, bovine, chicken, rabbit, camelid, donkey, human, and the like. For use in administration to humans, non-human derived antibodies or antigen-binding fragments may be genetically or structurally altered to be less antigenic upon administration to a human patient.

[0074] In some embodiments, the anti-Tau antibodies or antigen-binding fragments are chimeric. As used herein, the term “chimeric” refers to an antibody, or antigen-binding fragment thereof, having at least some portion of at least one variable domain derived from the antibody amino acid sequence of a non-human mammal, a rodent, or a reptile, while the remaining portions of the antibody, or antigen-binding fragment thereof, are derived from a human. For example, a chimeric antibody may comprise a mouse antigen binding domain with a human Fc or other such structural domain. Chimeric antibodies are renoted by the term “xi”. In some embodiments, the antibodies or antigen-binding fragments that specifically bind Tau are humanized antibodies or fragments. Humanized antibodies may be chimeric immunoglobulins, immunoglobulin chains or fragments thereof (such as Fv, Fab, Fab′, F(ab′)₂ or other antigen-binding subsequences of antibodies) that contain minimal sequence derived from non-human immunoglobulin. For the most part, humanized antibodies are human immunoglobulins (recipient antibody) in which residues from a complementary-determining region (CDR) of the recipient are replaced by residues from a CDR of a non-human species (donor antibody) such as mouse, rat or rabbit having the desired specificity, affinity, and capacity. In general, the humanized antibody will comprise substantially all of at least one, and typically two, variable domains, in which all or substantially all of the CDR regions correspond to those of a non-human immunoglobulin and all or substantially all of the framework regions are those of a human immunoglobulin sequence. The humanized antibody may include at least a portion of an immunoglobulin constant region (Fc), typically that of a human immunoglobulin. Humanized antibody heavy or light chains are denoted herein by the term “zu”.

[0075] The antibodies or antigen-binding fragments described herein can occur in a variety of forms, but will include one or more of the antibody variable domain segments or CDRs shown in Table 1.

TABLE 1
Antibody segments of the described antibodies and antigen-binding fragments thereof 7G6 VH sequences

| Clone | | | | | |
|---|---|---|---|---|---|
| Name | | | | | |
| (Species | | | | Variable Domain | Constant Domain |
| & | Heavy Chain | Heavy Chain | CDNA | (DNA) | (DNA) |
| Isotype) | DNA Sequence | Amino Acid Sequence | Leader | (amino acid) | (amino acid) |
| mouse | With leader [SEQ ID NO: | With leader [SEQ ID | ATGGGATG | CAGGTCCAACTGCTGCAG | GCCAAAACAACACCCCCA |
| 7G6- | 190]: | NO: 192] | GAGCTGTA | CCTGGGGCTGAGCTTGTG | TCAGTCTATCCACTGGCC |
| Vh | ATGGGATGGAGCTGTATCATCCTCA | MGWSCIILILVAAATGVHSQVQ | TCATCCTC | AAGCCTGGGGCTTCAGTA | CCTGGGTGTGGAGATACA |
| | TTTTGGTAGCAGCAGCTACAGGTGT | LLQPGAELVKPGASVIMSCKAS | ATTTTGGT | ATAATGTCCTGCAAGGCT | ACTGGTTCCTCTGTGACT |
| | CCACTCCCAGGTCCAACTGCTGCAG | GYTFTTYWITWVKQRPGQGLEW | AGCAGCAG | TCTGGCTACACCTTCACC | CTGGGATGCCTGGTCAAG |
| | CCTGGGGCTGAGCTTGTGAAGCCTG | IGDIYPGSSICNYNEKFKSKAT | CTACAGGT | ACCTACTGGATAACCTGG | GGCTA |
| | GGGCTTCAGTAATAATGTCCTGCAA | LTVDTSSSTAYMQLNSLTSEDS | GTCCACTC | GTGAAGCAGAGGCCTGGA | (Nucleotides 415 |
| | GGCTTCTGGCTACACCTTCACCACC | AVYYCAREDGYDAWFAYWGQGT | C | CAAGGCCTTGAGTGGATT | to 509 of SEQ ID |
| | TACTGGATAACCTGGGTGAAGCAGA | LVTVSAAKTTPPSVYPLAPGCG | (Nucleo- | GGAGATATTTATCCTGGT | NO: 190) |
| | GGCCTGGACAAGGCCTTGAGTGGAT | DTTGSSVTLGCLVKG | tides 1- | AGTAGTATTTGTAACTAC | [SEQ ID NO: 197] |
| | TGGAGATATTTATCCTGGTAGTAGT | Without leader [SEQ ID | 57 of | AATGAGAAGTTCAAGAGC | AKTTPPSVYPLAPGCGDT |
| | ATTTGTAACTACAATGAGAAGTTCA | NO: 193]: | SEQ ID | AAGGCCACACTGACTGTA | TGSSVTLGCLVKG |
| | AGAGCAAGGCCACACTGACTGTAGA | QVQLLQPGAELVKPGASVIMSC | NO: 190) | GACACATCCTCCAGCACA | [SEQ ID NO: 198] |
| | CACATCCTCCAGCACAGCCTACATG | KASGYTFTTYWITWVKQRPGQG | [SEQ ID | GCCTACATGCAGCTCAAC | |
| | CAGCTCAACAGCCTGACATCTGAGG | LEWIGDIYPGSSICNYNEKFKS | NO: 194] | AGCCTGACATCTGAGGAC | |
| | ACTCTGCGGTCTATTACTGTGCAAG | KATLTVDTSSSTAYMQLNSLTS | | TCTGCGGTCTATTACTGT | |
| | GGAGGATGGTTACGACGCCTGGTTT | EDSAVYYCAREDGYDAWFAYWG | | GCAAGGGAGGATGGTTAC | |
| | GCTTACTGGGGCCAAGGGACTCTGG | QGTLVTVSAAKTTPPSVYPLAP | | GACGCCTGGTTTGCTTAC | |
| | TCACTGTCTCCGCAGCCAAAACAAC | GCGDTTGSSVTLGCLVKG | | TGGGGCCAAGGGACTCTG | |
| | ACCCCCATCAGTCTATCCACTGGCC | | | GTCACTGTCTCCGCA | |
| | CCTGGGTGTGGAGATACAACTGGTT | | | (Nucleotides 58 to | |
| | CCTCTGTGACTCTGGGATGCCTGGT | | | 414 of SEQ ID NO: | |
| | CAAGGGCTA | | | 190) | |
| | Without leader [SEQ ID | | | [SEQ ID NO: 195] | |
| | NO: 191]: | | | QVQLLQPGAELVKPGASV | |
| | CAGGTCCAACTGCTGCAGCCTGGGG | | | IMSCKASGYTFTTYWITW | |
| | CTGAGCTTGTGAAGCCTGGGGCTTC | | | VKQRPGQGLEWIGDIYPG | |
| | AGTAATAATGTCCTGCAAGGCTTCT | | | SSICNYNEKFKSKATLTV | |
| | GGCTACACCTTCACCACCTACTGGA | | | DTSSSTAYMQLNSLTSED | |
| | TAACCTGGGTGAAGCAGAGGCCTGG | | | SAVYYCAREDGYDAWFAY | |
| | ACAAGGCCTTGAGTGGATTGGAGAT | | | WGQGTLVTVSA | |
| | ATTTATCCTGGTAGTAGTATTTGTA | | | [SEQ ID NO: 196] | |
| | ACTACAATGAGAAGTTCAAGAGCAA | | | | |
| | GGCCACACTGACTGTAGACACATCC | | | | |
| | TCCAGCACAGCCTACATGCAGCTCA | | | | |
| | ACAGCCTGACATCTGAGGACTCTGC | | | | |
| | GGTCTATTACTGTGCAAGGGAGGAT | | | | |
| | GGTTACGACGCCTGGTTTGCTTACT | | | | |
| | GGGGCCAAGGGACTCTGGTCACTGT | | | | |
| | CTCCGCAGCCAAAACAACACCCCCA | | | | |
| | TCAGTCTATCCACTGGCCCCTGGGT | | | | |
| | GTGGAGATACAACTGGTTCCTCTGT | | | | |
| | GACTCTGGGATGCCTGGTCAAGGGC | | | | |
| | TA | | | | |
| 7G6- | With leader [SEQ ID NO: | With leader [SEQ ID | ATGGGCTG | ATGGGCTGGTCCTGCATC | GCATCCACCAAGGGCCCA |
| HCzu1 | 199]: | NO: 201]: | GTCCTGCA | ATCCTGTTTCTGGTGGCC | TCGGTCTTCCCCCTGGCA |
| | ATGGGCTGGTCCTGCATCATCCTGT | MGWSCIILFLVATATGVHSQVQ | TCATCCTG | ACCGCCACCGGCGTGCAC | CCCTCCTCCAAGAGCACC |
| | TTCTGGTGGCCACCGCCACCGGCGT | LVQSGAEVKKPGASVKVSCKAS | TTTCTGGT | AGCCAGGTGCAGCTGGTG | TCTGGGGGCACAGCGGCC |
| | GCACAGCCAGGTGCAGCTGGTGCAG | GYTFTTYWITWVRQAPGQGLEW | GGCCACCG | CAGTCTGGCGCCGAAGTG | CTGGGCTGCCTGGTCAAG |
| | TCTGGCGCCGAAGTGAAGAAACCTG | MGDIYPGSSICNYNEKFKSRVT | CCACCGGC | AAGAAACCTGGCGCCTCC | GACTACTTCCCCGAACCG |
| | GCGCCTCCGTGAAGGTGTCCTGCAA | MTRDTSTSTVYMELSSLRSEDT | GTGCACAG | GTGAAGGTGTCCTGCAAG | GTGACGGTGTCGTGGAAC |
| | GGCTTCCGGCTACACCTTTACCACC | AVYYCAREDGYDAWFAYWGQGT | C | GCTTCCGGCTACACCTTT | TCAGGCGCCCTGACCAGC |
| | TACTGGATCACCTGGGTGCGACAGG | LVTVSSASTKGPSVFPLAPSSK | (Nucleo- | ACCACCTACTGGATCACC | GGCGTGCACACCTTCCCG |
| | CTCCTGGACAGGGCCTGGAATGGAT | STSGGTAALGCLVKDYFPEPVT | tides 1 | TGGGTGCGACAGGCTCCT | GCTGTCCTACAGTCCTCA |
| | GGGCGACATCTACCCCGGCTCCTCC | VSWNSGALTSGVHTFPAVLQSS | to 57 of | GGACAGGGCCTGGAATGG | GGACTCTACTCCCTCAGC |
| | ATCTGCAACTACAACGAGAAGTTCA | GLYSLSSVVTVPSSSLGTQTYI | SEQ ID | ATGGGCGACATCTACCCC | AGCGTGGTGACCGTGCCC |
| | AGTCCCGCGTGACCATGACCCGGGA | CNVNHKPSNTKVDKKVEPKSCD | NO: 199) | GGCTCCTCCATCTGCAAC | TCCAGCAGCTTGGGCACC |
| | CACCTCCACCAGCACCGTGTACATG | KTHTCPPCPAPELLGGPSVFLF | [SEQ ID | TACAACGAGAAGTTCAAG | CAGACCTACATCTGCAAC |
| | GAACTGTCCTCCCTGCGGAGCGAGG | PPKPKDTLMISRTPEVTCVVVD | NO: 203] | TCCCGCGTGACCATGACC | GTGAATCACAAGCCCAGC |
| | ACACCGCCGTGTACTACTGCGCTAG | VSHEDPEVKFNWYVDGVEVHNA | | CGGGACACCTCCACCAGC | AACACCAAGGTGGACAAG |
| | AGAGGACGGCTACGACGCTTGGTTT | KTKPREEQYNSTYRVVSVLTVL | | ACCGTGTACATGGAACTG | AAAGTTGAGCCCAAATCT |
| | GCCTACTGGGGCCAGGGCACCCTCG | HQDWLNGKEYKCKVSNKALPAP | | TCCTCCCTGCGGAGCGAG | TGTGACAAAACTCACACA |
| | TGACCGTGTCATCTGCATCCACCAA | IEKTISKAKGQPREPQVYTLPP | | GACACCGCCGTGTACTAC | TGCCCACCGTGCCCAGCA |
| | GGGCCCATCGGTCTTCCCCCTGGCA | SRDELTKNQVSLTCLVKGFYPS | | TGCGCTAGAGAGGACGGC | CCTGAACTCCTGGGGGGA |
| | CCCTCCTCCAAGAGCACCTCTGGGG | DIAVEWESNGQPENNYKTTPPV | | TACGACGCTTGGTTTGCC | CCGTCAGTCTTCCTCTTC |
| | GCACAGCGGCCCTGGGCTGCCTGGT | LDSDGSFFLYSKLTVDKSRWQQ | | TACTGGGGCCAGGGCACC | CCCCCAAAACCCAAGGAC |
| | CAAGGACTACTTCCCCGAACCGGTG | GNVFSCSVMHEALHNHYTQKSL | | CTCGTGACCGTGTCATCT | ACCCTCATGATCTCCCGG |
| | ACGGTGTCGTGGAACTCAGGCGCCC | SLSPGK | | (Nucleotides 58 to | ACCCCTGAGGTCACATGC |
| | TGACCAGCGGCGTGCACACCTTCCC | Without leader [SEQ ID | | 414 of SEQ ID NO: | GTGGTGGTGGACGTGAGC |
| | GGCTGTCCTACAGTCCTCAGGACTC | NO: 202]: | | 199) | CACGAAGACCCTGAGGTC |
| | TACTCCCTCAGCAGCGTGGTGACCG | QVQLVQSGAEVKKPGASVKVSC | | [SEQ ID NO: 204] | AAGTTCAACTGGTACGTG |
| | TGCCCTCCAGCAGCTTGGGCACCCA | KASGYTFTTYWITWVRQAPGQG | | QVQLVQSGAEVKKPGASV | GACGGCGTGGAGGTGCAT |
| | GACCTACATCTGCAACGTGAATCAC | LEWMGDIYPGSSICNYNEKFKS | | KVSCKASGYTFTTYWITW | AATGCCAAGACAAAGCCG |
| | AAGCCCAGCAACACCAAGGTGGACA | RVTMTRDTSTSTVYMELSSLRS | | VRQAPGOGLEWMGDIYPG | CGGGAGGAGCAGTACAAC |
| | AGAAAGTTGAGCCCAAATCTTGTGA | EDTAVYYCAREDGYDAWFAYWG | | SSICNYNEKFKSRVTMTR | AGCACGTACCGTGTGGTC |
| | CAAAACTCACACATGCCCACCGTGC | QGTLVTVSSASTKGPSVFPLAP | | DTSTSTVYMELSSLRSED | AGCGTCCTCACCGTCCTG |
| | CCAGCACCTGAACTCCTGGGGGGAC | SSKSTSGGTAALGCLVKDYFPE | | TAVYYCAREDGYDAWFAY | CACCAGGACTGGCTGAAT |
| | CGTCAGTCTTCCTCTTCCCCCCAAA | PVTVSWNSGALTSGVHTFPAVL | | WGQGTLVTVSS | GGCAAGGAGTACAAGTGC |
| | ACCCAAGGACACCCTCATGATCTCC | QSSGLYSLSSVVTVPSSSLGTQ | | [SEQ ID NO: 205] | AAGGTCTCCAACAAAGCC |
| | CGGACCCCTGAGGTCACATGCGTGG | TYICNVNHKPSNTKVDKKVEPK | | | CTCCCAGCCCCCATCGAG |
| | TGGTGGACGTGAGCCACGAAGACCC | SCDKTHTCPPCPAPELLGGPSV | | | AAAACCATCTCCAAAGCC |
| | TGAGGTCAAGTTCAACTGGTACGTG | FLFPPKPKDTLMISRTPEVTCV | | | AAAGGGCAGCCCCGAGAA |
| | GACGGCGTGGAGGTGCATAATGCCA | VVDVSHEDPEVKFNWYVDGVEV | | | CCACAGGTGTACACCCTG |
| | AGACAAAGCCGCGGGAGGAGCAGTA | HNAKTKPREEQYNSTYRVVSVL | | | CCCCCATCCCGGGATGAG |
| | CAACAGCACGTACCGTGTGGTCAGC | TVLHQDWLNGKEYKCKVSNKAL | | | CTGACCAAGAACCAGGTC |
| | GTCCTCACCGTCCTGCACCAGGACT | PAPIEKTISKAKGQPREPQVYT | | | AGCCTGACCTGCCTGGTC |
| | GGCTGAATGGCAAGGAGTACAAGTG | LPPSRDELTKNQVSLTCLVKGF | | | AAAGGCTTCTATCCCAGC |
| | CAAGGTCTCCAACAAAGCCCTCCCA | YPSDIAVEWESNGQPENNYKTT | | | GACATCGCCGTGGAGTGG |
| | GCCCCCATCGAGAAAACCATCTCCA | PPVLDSDGSFFLYSKLTVDKSR | | | GAGAGCAATGGGCAGCCG |
| | AAGCCAAAGGGCAGCCCCGAGAACC | WQQGNVFSCSVMHEALHNHYTQ | | | GAGAACAACTACAAGACC |
| | ACAGGTGTACACCCTGCCCCCATCC | KSLSLSPGK | | | ACGCCTCCCGTGCTGGAC |
| | CGGGATGAGCTGACCAAGAACCAGG | | | | TCCGACGGCTCCTTCTTC |
| | TCAGCCTGACCTGCCTGGTCAAAGG | | | | TTATATTCAAAGCTCACC |
| | CTTCTATCCCAGCGACATCGCCGTG | | | | GTGGACAAGAGCAGGTGG |
| | GAGTGGGAGAGCAATGGGCAGCCGG | | | | CAGCAGGGGAACGTCTTC |
| | AGAACAACTACAAGACCACGCCTCC | | | | TCATGCTCCGTGATGCAT |
| | CGTGCTGGACTCCGACGGCTCCTTC | | | | GAGGCTCTGCACAACCAC |
| | TTCTTATATTCAAAGCTCACCGTGG | | | | TACACGCAGAAGAGCCTC |
| | ACAAGAGCAGGTGGCAGCAGGGGAA | | | | TCCCTGTCTCCCGGG |
| | CGTCTTCTCATGCTCCGTGATGCAT | | | | (Nucleotides 415 |
| | GAGGCTCTGCACAACCACTACACGC | | | | to 1401 of:: SEQ ID |
| | AGAAGAGCCTCTCCCTGTCTCCCGG | | | | NO: 199) |
| | GAAATGA | | | | [SEQ ID NO: 206] |
| | Without leader [SEQ ID | | | | ASTKGPSVFPLAPSSKST |
| | NO: 200] | | | | SGGTAALGCLVKDYFPEP |
| | CAGGTGCAGCTGGTGCAGTCTGGCG | | | | VTVSWNSGALTSGVHTFP |
| | CCGAAGTGAAGAAACCTGGCGCCTC | | | | AVLQSSGLYSLSSVVTVP |
| | CGTGAAGGTGTCCTGCAAGGCTTCC | | | | SSSLGTQTYICNVNHKPS |
| | GGCTACACCTTTACCACCTACTGGA | | | | NTKVDKKVEPKSCDKTHT |
| | TCACCTGGGTGCGACAGGCTCCTGG | | | | CPPCPAPELLGGPSVFLF |
| | ACAGGGCCTGGAATGGATGGGCGAC | | | | PPKPKDTLMISRTPEVTC |
| | ATCTACCCCGGCTCCTCCATCTGCA | | | | VVVDVSHEDPEVKFNWYV |
| | ACTACAACGAGAAGTTCAAGTCCCG | | | | DGVEVHNAKTKPREEQYN |
| | CGTGACCATGACCCGGGACACCTCC | | | | STYRVVSVLTVLHQDWLN |
| | ACCAGCACCGTGTACATGGAACTGT | | | | GKEYKCKVSNKALPAPIE |
| | CCTCCCTGCGGAGCGAGGACACCGC | | | | KTISKAKGQPREPQVYTL |
| | CGTGTACTACTGCGCTAGAGAGGAC | | | | PPSRDELTKNQVSLTCLV |
| | GGCTACGACGCTTGGTTTGCCTACT | | | | KGFYPSDIAVEWESNGQP |
| | GGGGCCAGGGCACCCTCGTGACCGT | | | | ENNYKTTPPVLDSDGSFF |
| | GTCATCTGCATCCACCAAGGGCCCA | | | | LYSKLTVDKSRWQQGNVF |
| | TCGGTCTTCCCCCTGGCACCCTCCT | | | | SCS |
| | CCAAGAGCACCTCTGGGGGCACAGC | | | | [SEQ ID NO: 207] |
| | GGCCCTGGGCTGCCTGGTCAAGGAC | | | | |
| | TACTTCCCCGAACCGGTGACGGTGT | | | | |
| | CGTGGAACTCAGGCGCCCTGACCAG | | | | |
| | CGGCGTGCACACCTTCCCGGCTGTC | | | | |
| | CTACAGTCCTCAGGACTCTACTCCC | | | | |
| | TCAGCAGCGTGGTGACCGTGCCCTC | | | | |
| | CAGCAGCTTGGGCACCCAGACCTAC | | | | |
| | ATCTGCAACGTGAATCACAAGCCCA | | | | |
| | GCAACACCAAGGTGGACAAGAAAGT | | | | |
| | TGAGCCCAAATCTTGTGACAAAACT | | | | |
| | CACACATGCCCACCGTGCCCAGCAC | | | | |
| | CTGAACTCCTGGGGGGACCGTCAGT | | | | |
| | CTTCCTCTTCCCCCCAAAACCCAAG | | | | |
| | GACACCCTCATGATCTCCCGGACCC | | | | |
| | CTGAGGTCACATGCGTGGTGGTGGA | | | | |
| | CGTGAGCCACGAAGACCCTGAGGTC | | | | |
| | AAGTTCAACTGGTACGTGGACGGCG | | | | |
| | TGGAGGTGCATAATGCCAAGACAAA | | | | |
| | GCCGCGGGAGGAGCAGTACAACAGC | | | | |
| | ACGTACCGTGTGGTCAGCGTCCTCA | | | | |
| | CCGTCCTGCACCAGGACTGGCTGAA | | | | |
| | TGGCAAGGAGTACAAGTGCAAGGTC | | | | |
| | TCCAACAAAGCCCTCCCAGCCCCCA | | | | |
| | TCGAGAAAACCATCTCCAAAGCCAA | | | | |
| | AGGGCAGCCCCGAGAACCACAGGTG | | | | |
| | TACACCCTGCCCCCATCCCGGGATG | | | | |
| | AGCTGACCAAGAACCAGGTCAGCCT | | | | |
| | GACCTGCCTGGTCAAAGGCTTCTAT | | | | |
| | CCCAGCGACATCGCCGTGGAGTGGG | | | | |
| | AGAGCAATGGGCAGCCGGAGAACAA | | | | |
| | CTACAAGACCACGCCTCCCGTGCTG | | | | |
| | GACTCCGACGGCTCCTTCTTCTTAT | | | | |
| | ATTCAAAGCTCACCGTGGACAAGAG | | | | |
| | CAGGTGGCAGCAGGGGAACGTCTTC | | | | |
| | TCATGCTCCGTGATGCATGAGGCTC | | | | |
| | TGCACAACCACTACACGCAGAAGAG | | | | |
| | CCTCTCCCTGTCTCCCGGGAAATGA | | | | |
| 7G6- | With leader [SEQ ID NO: | With leader [SEQ ID | ATGGGCTG | CAGGTGCAGCTGGTGCAG | GCATCCACCAAGGGCCCA |
| HCzu2 | 208]: | NO: 210]: | GTCCTGCA | TCTGGCGCCGAAGTGAAG | TCGGTCTTCCCCCTGGCA |
| | ATGGGCTGGTCCTGCATCATCCTGT | MGWSCIILFLVATATGVHSQVQ | TCATCCTG | AAACCTGGCGCCTCCGTG | CCCTCCTCCAAGAGCACC |
| | TTCTGGTGGCCACCGCCACCGGCGT | LVQSGAEVKKPGASVKVSCKAS | TTTCTGGT | AAGGTGTCCTGCAAGGCT | TCTGGGGGCACAGCGGCC |
| | GCACAGCCAGGTGCAGCTGGTGCAG | GYTFTTYWITWVRQAPGQGLEW | GGCCACCG | TCCGGCTACACCTTTACC | CTGGGCTGCCTGGTCAAG |
| | TCTGGCGCCGAAGTGAAGAAACCTG | MGDIYPGSSICNYNEKFKSRVT | CCACCGGC | ACCTACTGGATCACCTGG | GACTACTTCCCCGAACCG |
| | GCGCCTCCGTGAAGGTGTCCTGCAA | MTVDTSTSTVYMELSSLRSEDT | GTGCACAG | GTGCGACAGGCTCCTGGA | GTGACGGTGTCGTGGAAC |
| | GGCTTCCGGCTACACCTTTACCACC | AVYYCAREDGYDAWFAYWGQGT | C | CAGGGCCTGGAATGGATG | TCAGGCGCCCTGACCAGC |
| | TACTGGATCACCTGGGTGCGACAGG | LVTVSSASTKGPSVFPLAPSSK | (Nucleo- | GGCGACATCTACCCCGGC | GGCGTGCACACCTTCCCG |
| | CTCCTGGACAGGGCCTGGAATGGAT | STSGGTAALGCLVKDYFPEPVT | tides 1 | TCCTCCATCTGCAACTAC | GCTGTCCTACAGTCCTCA |
| | GGGCGACATCTACCCCGGCTCCTCC | VSWNSGALTSGVHTFPAVLQSS | to 57) | AACGAGAAGTTCAAGTCC | GGACTCTACTCCCTCAGC |
| | ATCTGCAACTACAACGAGAAGTTCA | GLYSLSSVVTVPSSSLGTQTYI | [SEQ ID | CGCGTGACCATGACCGTG | AGCGTGGTGACCGTGCCC |
| | AGTCCCGCGTGACCATGACCGTGGA | CNVNHKPSNTKVDKKVEPKSCD | NO: 212] | GACACCTCCACCAGCACC | TCCAGCAGCTTGGGCACC |
| | CACCTCCACCAGCACCGTGTACATG | KTHTCPPCPAPELLGGPSVFLF | | GTGTACATGGAACTGTCC | CAGACCTACATCTGCAAC |
| | GAACTGTCCTCCCTGCGGAGCGAGG | PPKPKDTLMISRTPEVTCVVVD | | TCCCTGCGGAGCGAGGAC | GTGAATCACAAGCCCAGC |
| | ACACCGCCGTGTACTACTGCGCTAG | VSHEDPEVKFNWYVDGVEVHNA | | ACCGCCGTGTACTACTGC | AACACCAAGGTGGACAAG |
| | AGAGGACGGCTACGACGCTTGGTTT | KTKPREEQYNSTYRVVSVLTVL | | GCTAGAGAGGACGGCTAC | AAAGTTGAGCCCAAATCT |
| | GCCTACTGGGGCCAGGGCACCCTCG | HQDWLNGKEYKCKVSNKALPAP | | GACGCTTGGTTTGCCTAC | TGTGACAAAACTCACACA |
| | TGACCGTGTCATCTGCATCCACCAA | IEKTISKAKGQPREPQVYTLPP | | TGGGGCCAGGGCACCCTC | TGCCCACCGTGCCCAGCA |
| | GGGCCCATCGGTCTTCCCCCTGGCA | SRDELTKNQVSLTCLVKGFYPS | | GTGACCGTGTCATCT | CCTGAACTCCTGGGGGGA |
| | CCCTCCTCCAAGAGCACCTCTGGGG | DIAVEWESNGQPENNYKTTPPV | | (Nucleotides 58 to | CCGTCAGTCTTCCTCTTC |
| | GCACAGCGGCCCTGGGCTGCCTGGT | LDSDGSFFLYSKLTVDKSRWQQ | | 414 of SEQ ID NO: | CCCCCAAAACCCAAGGAC |
| | CAAGGACTACTTCCCCGAACCGGTG | GNVFSCSVMHEALHNHYTQKSL | | 208) | ACCCTCATGATCTCCCGG |
| | ACGGTGTCGTGGAACTCAGGCGCCC | SLSPGK | | [SEQ ID NO: 213] | ACCCCTGAGGTCACATGC |
| | TGACCAGCGGCGTGCACACCTTCCC | Without leader [SEQ ID | | QVQLVQSGAEVKKPGASV | GTGGTGGTGGACGTGAGC |
| | GGCTGTCCTACAGTCCTCAGGACTC | NO: 211]: | | KVSCKASGYTFTTYWITW | CACGAAGACCCTGAGGTC |
| | TACTCCCTCAGCAGCGTGGTGACCG | QVQLVQSGAEVKKPGASVKVSC | | VRQAPGQGLEWMGDIYPG | AAGTTCAACTGGTACGTG |
| | TGCCCTCCAGCAGCTTGGGCACCCA | KASGYTFTTYWITWVRQAPGQG | | SSICNYNEKFKSRVTMTV | GACGGCGTGGAGGTGCAT |
| | GACCTACATCTGCAACGTGAATCAC | LEWMGDIYPGSSICNYNEKFKS | | DTSTSTVYMELSSLRSED | AATGCCAAGACAAAGCCG |
| | AAGCCCAGCAACACCAAGGTGGACA | RVTMTVDTSTSTVYMELSSLRS | | TAVYYCAREDGYDAWFAY | CGGGAGGAGCAGTACAAC |
| | AGAAAGTTGAGCCCAAATCTTGTGA | EDTAVYYCAREDGYDAWFAYWG | | WGQGTLVTVSS | AGCACGTACCGTGTGGTC |
| | CAAAACTCACACATGCCCACCGTGC | QGTLVTVSSASTKGPSVFPLAP | | [SEQ ID NO: 214] | AGCGTCCTCACCGTCCTG |
| | CCAGCACCTGAACTCCTGGGGGGAC | SSKSTSGGTAALGCLVKDYFPE | | | CACCAGGACTGGCTGAAT |
| | CGTCAGTCTTCCTCTTCCCCCCAAA | PVTVSWNSGALTSGVHTFPAVL | | | GGCAAGGAGTACAAGTGC |
| | ACCCAAGGACACCCTCATGATCTCC | QSSGLYSLSSVVTVPSSSLGTQ | | | AAGGTCTCCAACAAAGCC |
| | CGGACCCCTGAGGTCACATGCGTGG | TYICNVNHKPSNTKVDKKVEPK | | | CTCCCAGCCCCCATCGAG |
| | TGGTGGACGTGAGCCACGAAGACCC | SCDKTHTCPPCPAPELLGGPSV | | | AAAACCATCTCCAAAGCC |
| | TGAGGTCAAGTTCAACTGGTACGTG | FLFPPKPKDTLMISRTPEVTCV | | | AAAGGGCAGCCCCGAGAA |
| | GACGGCGTGGAGGTGCATAATGCCA | VVDVSHEDPEVKFNWYVDGVEV | | | CCACAGGTGTACACCCTG |
| | AGACAAAGCCGCGGGAGGAGCAGTA | HNAKTKPREEQYNSTYRVVSVL | | | CCCCCATCCCGGGATGAG |
| | CAACAGCACGTACCGTGTGGTCAGC | TVLHQDWLNGKEYKCKVSNKAL | | | CTGACCAAGAACCAGGTC |
| | GTCCTCACCGTCCTGCACCAGGACT | PAPIEKTISKAKGQPREPQVYT | | | AGCCTGACCTGCCTGGTC |
| | GGCTGAATGGCAAGGAGTACAAGTG | LPPSRDELTKNQVSLTCLVKGF | | | AAAGGCTTCTATCCCAGC |
| | CAAGGTCTCCAACAAAGCCCTCCCA | YPSDIAVEWESNGQPENNYKTT | | | GACATCGCCGTGGAGTGG |
| | GCCCCCATCGAGAAAACCATCTCCA | PPVLDSDGSFFLYSKLTVDKSR | | | GAGAGCAATGGGCAGCCG |
| | AAGCCAAAGGGCAGCCCCGAGAACC | WQQGNVFSCSVMHEALHNHYTQ | | | GAGAACAACTACAAGACC |
| | ACAGGTGTACACCCTGCCCCCATCC | KSLSLSPGK | | | ACGCCTCCCGTGCTGGAC |
| | CGGGATGAGCTGACCAAGAACCAGG | | | | TCCGACGGCTCCTTCTTC |
| | TCAGCCTGACCTGCCTGGTCAAAGG | | | | TTATATTCAAAGCTCACC |
| | CTTCTATCCCAGCGACATCGCCGTG | | | | GTGGACAAGAGCAGGTGG |
| | GAGTGGGAGAGCAATGGGCAGCCGG | | | | CAGCAGGGGAACGTCTTC |
| | AGAACAACTACAAGACCACGCCTCC | | | | TCATGCTCCGTGATGCAT |
| | CGTGCTGGACTCCGACGGCTCCTTC | | | | GAGGCTCTGCACAACCAC |
| | TTCTTATATTCAAAGCTCACCGTGG | | | | TACACGCAGAAGAGCCTC |
| | ACAAGAGCAGGTGGCAGCAGGGGAA | | | | TCCCTGTCTCCCGGG |
| | CGTCTTCTCATGCTCCGTGATGCAT | | | | (Nucleotide 415 to |
| | GAGGCTCTGCACAACCACTACACGC | | | | 1401 of SEQ ID NO: |
| | AGAAGAGCCTCTCCCTGTCTCCCGG | | | | 208) [SEQ ID NO: |
| | GAAATGA | | | | 215] |
| | Without leader [SEQ ID | | | | ASTKGPSVFPLAPSSKST |
| | NO: 209]: | | | | SGGTAALGCLVKDYFPEP |
| | CAGGTGCAGCTGGTGCAGTCTGGCG | | | | VTVSWNSGALTSGVHTFP |
| | CCGAAGTGAAGAAACCTGGCGCCTC | | | | AVLQSSGLYSLSSVVTVP |
| | CGTGAAGGTGTCCTGCAAGGCTTCC | | | | SSSLGTQTYICNVNHKPS |
| | GGCTACACCTTTACCACCTACTGGA | | | | NTKVDKKVEPKSCDKTHT |
| | TCACCTGGGTGCGACAGGCTCCTGG | | | | CPPCPAPELLGGPSVFLF |
| | ACAGGGCCTGGAATGGATGGGCGAC | | | | PPKPKDTLMISRTPEVTC |
| | ATCTACCCCGGCTCCTCCATCTGCA | | | | VVVDVSHEDPEVKFNWYV |
| | ACTACAACGAGAAGTTCAAGTCCCG | | | | DGVEVHNAKTKPREEQYN |
| | CGTGACCATGACCGTGGACACCTCC | | | | STYRVVSVLTVLHQDWLN |
| | ACCAGCACCGTGTACATGGAACTGT | | | | GKEYKCKVSNKALPAPIE |
| | CCTCCCTGCGGAGCGAGGACACCGC | | | | KTISKAKGQPREPQVYTL |
| | CGTGTACTACTGCGCTAGAGAGGAC | | | | PPSRDELTKNQVSLTCLV |
| | GGCTACGACGCTTGGTTTGCCTACT | | | | KGFYPSDIAVEWESNGQP |
| | GGGGCCAGGGCACCCTCGTGACCGT | | | | ENNYKTTPPVLDSDGSFF |
| | GTCATCTGCATCCACCAAGGGCCCA | | | | LYSKLTVDKSRWQQGNVF |
| | TCGGTCTTCCCCCTGGCACCCTCCT | | | | SCSVMHEALHNHYTQKSL |
| | CCAAGAGCACCTCTGGGGGCACAGC | | | | SLSPGK |
| | GGCCCTGGGCTGCCTGGTCAAGGAC | | | | [SEQ ID NO: 216] |
| | TACTTCCCCGAACCGGTGACGGTGT | | | | |
| | CGTGGAACTCAGGCGCCCTGACCAG | | | | |
| | CGGCGTGCACACCTTCCCGGCTGTC | | | | |
| | CTACAGTCCTCAGGACTCTACTCCC | | | | |
| | TCAGCAGCGTGGTGACCGTGCCCTC | | | | |
| | CAGCAGCTTGGGCACCCAGACCTAC | | | | |
| | ATCTGCAACGTGAATCACAAGCCCA | | | | |
| | GCAACACCAAGGTGGACAAGAAAGT | | | | |
| | TGAGCCCAAATCTTGTGACAAAACT | | | | |
| | CACACATGCCCACCGTGCCCAGCAC | | | | |
| | CTGAACTCCTGGGGGGACCGTCAGT | | | | |
| | CTTCCTCTTCCCCCCAAAACCCAAG | | | | |
| | GACACCCTCATGATCTCCCGGACCC | | | | |
| | CTGAGGTCACATGCGTGGTGGTGGA | | | | |
| | CGTGAGCCACGAAGACCCTGAGGTC | | | | |
| | AAGTTCAACTGGTACGTGGACGGCG | | | | |
| | TGGAGGTGCATAATGCCAAGACAAA | | | | |
| | GCCGCGGGAGGAGCAGTACAACAGC | | | | |
| | ACGTACCGTGTGGTCAGCGTCCTCA | | | | |
| | CCGTCCTGCACCAGGACTGGCTGAA | | | | |
| | TGGCAAGGAGTACAAGTGCAAGGTC | | | | |
| | TCCAACAAAGCCCTCCCAGCCCCCA | | | | |
| | TCGAGAAAACCATCTCCAAAGCCAA | | | | |
| | AGGGCAGCCCCGAGAACCACAGGTG | | | | |
| | TACACCCTGCCCCCATCCCGGGATG | | | | |
| | AGCTGACCAAGAACCAGGTCAGCCT | | | | |
| | GACCTGCCTGGTCAAAGGCTTCTAT | | | | |
| | CCCAGCGACATCGCCGTGGAGTGGG | | | | |
| | AGAGCAATGGGCAGCCGGAGAACAA | | | | |
| | CTACAAGACCACGCCTCCCGTGCTG | | | | |
| | GACTCCGACGGCTCCTTCTTCTTAT | | | | |
| | ATTCAAAGCTCACCGTGGACAAGAG | | | | |
| | CAGGTGGCAGCAGGGGAACGTCTTC | | | | |
| | TCATGCTCCGTGATGCATGAGGCTC | | | | |
| | TGCACAACCACTACACGCAGAAGAG | | | | |
| | CCTCTCCCTGTCTCCCGGGAAATGA | | | | |
| 7G6- | With leader [SEQ ID NO: | With leader [SEQ ID | ATGGGCTG | CAGGTGCAGCTGGTGCAG | GCATCCACCAAGGGCCCA |
| HCzu3 | 217]: | NO: 219]: | GTCCTGCA | TCTGGCGCCGAAGTGAAG | TCGGTCTTCCCCCTGGCA |
| | ATGGGCTGGTCCTGCATCATCCTGT | MGWSCIILFLVATATGVHSQVQ | TCATCCTG | AAACCTGGCGCCTCCGTG | CCCTCCTCCAAGAGCACC |
| | TTCTGGTGGCCACCGCCACCGGCGT | LVQSGAEVKKPGASVKVSCKAS | TTTCTGGT | AAGGTGTCCTGCAAGGCT | TCTGGGGGCACAGCGGCC |
| | GCACAGCCAGGTGCAGCTGGTGCAG | GYTFTTYWITWVRQAPGQGLEW | GGCCACCG | TCCGGCTACACCTTTACC | CTGGGCTGCCTGGTCAAG |
| | TCTGGCGCCGAAGTGAAGAAACCTG | MGDIYPGSSICNYNEKFKSRVT | CCACCGGC | ACCTACTGGATCACCTGG | GACTACTTCCCCGAACCG |
| | GCGCCTCCGTGAAGGTGTCCTGCAA | MTVDTSTSTAYMELSSLRSEDT | GTGCACAG | GTGCGACAGGCTCCTGGA | GTGACGGTGTCGTGGAAC |
| | GGCTTCCGGCTACACCTTTACCACC | AVYYCAREDGYDAWFAYWGQGT | C | CAGGGCCTGGAATGGATG | TCAGGCGCCCTGACCAGC |
| | TACTGGATCACCTGGGTGCGACAGG | LVTVSSASTKGPSVFPLAPSSK | (Nucleo- | GGCGACATCTACCCCGGC | GGCGTGCACACCTTCCCG |
| | CTCCTGGACAGGGCCTGGAATGGAT | STSGGTAALGCLVKDYFPEPVT | tide 1 to | TCCTCCATCTGCAACTAC | GCTGTCCTACAGTCCTCA |
| | GGGCGACATCTACCCCGGCTCCTCC | VSWNSGALTSGVHTFPAVLQSS | 57 of | AACGAGAAGTTCAAGTCC | GGACTCTACTCCCTCAGC |
| | ATCTGCAACTACAACGAGAAGTTCA | GLYSLSSVVTVPSSSLGTQTYI | SEQ ID | CGCGTGACCATGACCGTG | AGCGTGGTGACCGTGCCC |
| | AGTCCCGCGTGACCATGACCGTGGA | CNVNHKPSNTKVDKKVEPKSCD | O: 217) | GACACCTCCACCAGCACC | TCCAGCAGCTTGGGCACC |
| | CACCTCCACCAGCACCGCCTACATG | KTHTCPPCPAPELLGGPSVFLF | [SEQ ID | GCCTACATGGAACTGTCC | CAGACCTACATCTGCAAC |
| | GAACTGTCCTCCCTGCGGAGCGAGG | PPKPKDTLMISRTPEVTCVVVD | NO: 221] | TCCCTGCGGAGCGAGGAC | GTGAATCACAAGCCCAGC |
| | ACACCGCCGTGTACTACTGCGCTAG | VSHEDPEVKFNWYVDGVEVHNA | | ACCGCCGTGTACTACTGC | AACACCAAGGTGGACAAG |
| | AGAGGACGGCTACGACGCTTGGTTT | KTKPREEQYNSTYRVVSVLTVL | | GCTAGAGAGGACGGCTAC | AAAGTTGAGCCCAAATCT |
| | GCCTACTGGGGCCAGGGCACCCTCG | HQDWLNGKEYKCKVSNKALPAP | | GACGCTTGGTTTGCCTAC | TGTGACAAAACTCACACA |
| | TGACCGTGTCATCTGCATCCACCAA | IEKTISKAKGQPREPQVYTLPP | | TGGGGCCAGGGCACCCTC | TGCCCACCGTGCCCAGCA |
| | GGGCCCATCGGTCTTCCCCCTGGCA | SRDELTKNQVSLTCLVKGFYPS | | GTGACCGTGTCATCT | CCTGAACTCCTGGGGGGA |
| | CCCTCCTCCAAGAGCACCTCTGGGG | DIAVEWESNGQPENNYKTTPPV | | (Nucleotides 58 to | CCGTCAGTCTTCCTCTTC |
| | GCACAGCGGCCCTGGGCTGCCTGGT | LDSDGSFFLYSKLTVDKSRWQQ | | 414 of SEQ ID NO: | CCCCCAAAACCCAAGGAC |
| | CAAGGACTACTTCCCCGAACCGGTG | GNVFSCSVMHEALHNHYTQKSL | | 217) | ACCCTCATGATCTCCCGG |
| | ACGGTGTCGTGGAACTCAGGCGCCC | SLSPGK | | [SEQ ID NO: 222] | ACCCCTGAGGTCACATGC |
| | TGACCAGCGGCGTGCACACCTTCCC | Without leader [SEQ ID | | QVQLVQSGAEVKKPGASV | GTGGTGGTGGACGTGAGC |
| | GGCTGTCCTACAGTCCTCAGGACTC | NO: 220]: | | KVSCKASGYTFTTYWITW | CACGAAGACCCTGAGGTC |
| | TACTCCCTCAGCAGCGTGGTGACCG | QVQLVQSGAEVKKPGASVKVSC | | VRQAPGQGLEWMGDIYPG | AAGTTCAACTGGTACGTG |
| | TGCCCTCCAGCAGCTTGGGCACCCA | KASGYTFTTYWITWVRQAPGQG | | SSICNYNEKFKSRVTMTV | GACGGCGTGGAGGTGCAT |
| | GACCTACATCTGCAACGTGAATCAC | LEWMGDIYPGSSICNYNEKFKS | | DTSTSTAYMELSSLRSED | AATGCCAAGACAAAGCCG |
| | AAGCCCAGCAACACCAAGGTGGACA | RVTMTVDTSTSTAYMELSSLRS | | TAVYYCAREDGYDAWFAY | CGGGAGGAGCAGTACAAC |
| | AGAAAGTTGAGCCCAAATCTTGTGA | EDTAVYYCAREDGYDAWFAYWG | | WGQGTLVTVSS | AGCACGTACCGTGTGGTC |
| | CAAAACTCACACATGCCCACCGTGC | QGTLVTVSSASTKGPSVFPLAP | | [SEQ ID NO: 223] | AGCGTCCTCACCGTCCTG |
| | CCAGCACCTGAACTCCTGGGGGGAC | SSKSTSGGTAALGCLVKDYFPE | | | CACCAGGACTGGCTGAAT |
| | CGTCAGTCTTCCTCTTCCCCCCAAA | PVTVSWNSGALTSGVHTFPAVL | | | GGCAAGGAGTACAAGTGC |
| | ACCCAAGGACACCCTCATGATCTCC | QSSGLYSLSSVVTVPSSSLGTQ | | | AAGGTCTCCAACAAAGCC |
| | CGGACCCCTGAGGTCACATGCGTGG | TYICNVNHKPSNTKVDKKVEPK | | | CTCCCAGCCCCCATCGAG |
| | TGGTGGACGTGAGCCACGAAGACCC | SCDKTHTCPPCPAPELLGGPSV | | | AAAACCATCTCCAAAGCC |
| | TGAGGTCAAGTTCAACTGGTACGTG | FLFPPKPKDTLMISRTPEVTCV | | | AAAGGGCAGCCCCGAGAA |
| | GACGGCGTGGAGGTGCATAATGCCA | VVDVSHEDPEVKFNWYVDGVEV | | | CCACAGGTGTACACCCTG |
| | AGACAAAGCCGCGGGAGGAGCAGTA | HNAKTKPREEQYNSTYRVVSVL | | | CCCCCATCCCGGGATGAG |
| | CAACAGCACGTACCGTGTGGTCAGC | TVLHQDWLNGKEYKCKVSNKAL | | | CTGACCAAGAACCAGGTC |
| | GTCCTCACCGTCCTGCACCAGGACT | PAPIEKTISKAKGQPREPQVYT | | | AGCCTGACCTGCCTGGTC |
| | GGCTGAATGGCAAGGAGTACAAGTG | LPPSRDELTKNQVSLTCLVKGF | | | AAAGGCTTCTATCCCAGC |
| | CAAGGTCTCCAACAAAGCCCTCCCA | YPSDIAVEWESNGQPENNYKTT | | | GACATCGCCGTGGAGTGG |
| | GCCCCCATCGAGAAAACCATCTCCA | PPVLDSDGSFFLYSKLTVDKSR | | | GAGAGCAATGGGCAGCCG |
| | AAGCCAAAGGGCAGCCCCGAGAACC | WQQGNVFSCSVMHEALHNHYTQ | | | GAGAACAACTACAAGACC |
| | ACAGGTGTACACCCTGCCCCCATCC | KSLSLSPGK | | | ACGCCTCCCGTGCTGGAC |
| | CGGGATGAGCTGACCAAGAACCAGG | | | | TCCGACGGCTCCTTCTTC |
| | TCAGCCTGACCTGCCTGGTCAAAGG | | | | TTATATTCAAAGCTCACC |
| | CTTCTATCCCAGCGACATCGCCGTG | | | | GTGGACAAGAGCAGGTGG |
| | GAGTGGGAGAGCAATGGGCAGCCGG | | | | CAGCAGGGGAACGTCTTC |
| | AGAACAACTACAAGACCACGCCTCC | | | | TCATGCTCCGTGATGCAT |
| | CGTGCTGGACTCCGACGGCTCCTTC | | | | GAGGCTCTGCACAACCAC |
| | TTCTTATATTCAAAGCTCACCGTGG | | | | TACACGCAGAAGAGCCTC |
| | ACAAGAGCAGGTGGCAGCAGGGGAA | | | | TCCCTGTCTCCCGGG |
| | CGTCTTCTCATGCTCCGTGATGCAT | | | | (Nucleotides 415 |
| | GAGGCTCTGCACAACCACTACACGC | | | | to 1401 of SEQ ID |
| | AGAAGAGCCTCTCCCTGTCTCCCGG | | | | NO: 217) |
| | GAAATGA | | | | [SEQ ID NO: 224] |
| | Without leader [SEQ ID | | | | ASTKGPSVFPLAPSSKST |
| | NO: 218]: | | | | SGGTAALGCLVKDYFPEP |
| | CAGGTGCAGCTGGTGCAGTCTGGCG | | | | VTVSWNSGALTSGVHTFP |
| | CCGAAGTGAAGAAACCTGGCGCCTC | | | | AVLQSSGLYSLSSVVTVP |
| | CGTGAAGGTGTCCTGCAAGGCTTCC | | | | SSSLGTQTYICNVNHKPS |
| | GGCTACACCTTTACCACCTACTGGA | | | | NTKVDKKVEPKSCDKTHT |
| | TCACCTGGGTGCGACAGGCTCCTGG | | | | CPPCPAPELLGGPSVFLF |
| | ACAGGGCCTGGAATGGATGGGCGAC | | | | PPKPKDTLMISRTPEVTC |
| | ATCTACCCCGGCTCCTCCATCTGCA | | | | VVVDVSHEDPEVKFNWYV |
| | ACTACAACGAGAAGTTCAAGTCCCG | | | | DGVEVHNAKTKPREEQYN |
| | CGTGACCATGACCGTGGACACCTCC | | | | STYRVVSVLTVLHQDWLN |
| | ACCAGCACCGCCTACATGGAACTGT | | | | GKEYKCKVSNKALPAPIE |
| | CCTCCCTGCGGAGCGAGGACACCGC | | | | KTISKAKGQPREPQVYTL |
| | CGTGTACTACTGCGCTAGAGAGGAC | | | | PPSRDELTKNQVSLTCLV |
| | GGCTACGACGCTTGGTTTGCCTACT | | | | KGFYPSDIAVEWESNGQP |
| | GGGGCCAGGGCACCCTCGTGACCGT | | | | ENNYKTTPPVLDSDGSFF |
| | GTCATCTGCATCCACCAAGGGCCCA | | | | LYSKLTVDKSRWQQGNVF |
| | TCGGTCTTCCCCCTGGCACCCTCCT | | | | SCSVMHEALHNHYTQKSL |
| | CCAAGAGCACCTCTGGGGGCACAGC | | | | SLSPGK |
| | GGCCCTGGGCTGCCTGGTCAAGGAC | | | | [SEQ ID NO: 225] |
| | TACTTCCCCGAACCGGTGACGGTGT | | | | |
| | CGTGGAACTCAGGCGCCCTGACCAG | | | | |
| | CGGCGTGCACACCTTCCCGGCTGTC | | | | |
| | CTACAGTCCTCAGGACTCTACTCCC | | | | |
| | TCAGCAGCGTGGTGACCGTGCCCTC | | | | |
| | CAGCAGCTTGGGCACCCAGACCTAC | | | | |
| | ATCTGCAACGTGAATCACAAGCCCA | | | | |
| | GCAACACCAAGGTGGACAAGAAAGT | | | | |
| | TGAGCCCAAATCTTGTGACAAAACT | | | | |
| | CACACATGCCCACCGTGCCCAGCAC | | | | |
| | CTGAACTCCTGGGGGGACCGTCAGT | | | | |
| | CTTCCTCTTCCCCCCAAAACCCAAG | | | | |
| | GACACCCTCATGATCTCCCGGACCC | | | | |
| | CTGAGGTCACATGCGTGGTGGTGGA | | | | |
| | CGTGAGCCACGAAGACCCTGAGGTC | | | | |
| | AAGTTCAACTGGTACGTGGACGGCG | | | | |
| | TGGAGGTGCATAATGCCAAGACAAA | | | | |
| | GCCGCGGGAGGAGCAGTACAACAGC | | | | |
| | ACGTACCGTGTGGTCAGCGTCCTCA | | | | |
| | CCGTCCTGCACCAGGACTGGCTGAA | | | | |
| | TGGCAAGGAGTACAAGTGCAAGGTC | | | | |
| | TCCAACAAAGCCCTCCCAGCCCCCA | | | | |
| | TCGAGAAAACCATCTCCAAAGCCAA | | | | |
| | AGGGCAGCCCCGAGAACCACAGGTG | | | | |
| | TACACCCTGCCCCCATCCCGGGATG | | | | |
| | AGCTGACCAAGAACCAGGTCAGCCT | | | | |
| | GACCTGCCTGGTCAAAGGCTTCTAT | | | | |
| | CCCAGCGACATCGCCGTGGAGTGGG | | | | |
| | AGAGCAATGGGCAGCCGGAGAACAA | | | | |
| | CTACAAGACCACGCCTCCCGTGCTG | | | | |
| | GACTCCGACGGCTCCTTCTTCTTAT | | | | |
| | ATTCAAAGCTCACCGTGGACAAGAG | | | | |
| | CAGGTGGCAGCAGGGGAACGTCTTC | | | | |
| | TCATGCTCCGTGATGCATGAGGCTC | | | | |
| | TGCACAACCACTACACGCAGAAGAG | | | | |
| | CCTCTCCCTGTCTCCCGG | | | | |
| | GAAATGA | | | | |
| 7G6- | With leader [SEQ ID NO: | With leader [SEQ ID | ATGGGCTG | CAGGTGCAGCTGGTGCAG | GCATCCACCAAGGGCCCA |
| HCzu4 | 226]: | NO: 228]: | GTCCTGCA | TCTGGCGCCGAAGTGAAG | TCGGTCTTCCCCCTGGCA |
| | ATGGGCTGGTCCTGCATCATCCTGT | MGWSCIILFLVATATGVHSQVQ | TCATCCTG | AAACCTGGCGCCTCCGTG | CCCTCCTCCAAGAGCACC |
| | TTCTGGTGGCCACCGCCACCGGCGT | LVQSGAEVKKPGASVKVSCKAS | TTTCTGGT | AAGGTGTCCTGCAAGGCT | TCTGGGGGCACAGCGGCC |
| | GCACAGCCAGGTGCAGCTGGTGCAG | GYTFTTYWITWVRQAPGQGLEW | GGCCACCG | TCCGGCTACACCTTTACC | CTGGGCTGCCTGGTCAAG |
| | TCTGGCGCCGAAGTGAAGAAACCTG | MGDIYPGSSICNYAQKFQGRVT | CCACCGGC | ACCTACTGGATCACCTGG | GACTACTTCCCCGAACCG |
| | GCGCCTCCGTGAAGGTGTCCTGCAA | MTVDTSTSTAYMELSSLRSEDT | GTGCACAG | GTGCGACAGGCTCCTGGA | GTGACGGTGTCGTGGAAC |
| | GGCTTCCGGCTACACCTTTACCACC | AVYYCAREDGYDAWFAYWGQGT | C | CAGGGCCTGGAATGGATG | TCAGGCGCCCTGACCAGC |
| | TACTGGATCACCTGGGTGCGACAGG | LVTVSSASTKGPSVFPLAPSSK | (Nucleo- | GGCGACATCTACCCCGGC | GGCGTGCACACCTTCCCG |
| | CTCCTGGACAGGGCCTGGAATGGAT | STSGGTAALGCLVKDYFPEPVT | tide 1 to | TCCTCCATCTGCAACTAC | GCTGTCCTACAGTCCTCA |
| | GGGCGACATCTACCCCGGCTCCTCC | VSWNSGALTSGVHTFPAVLQSS | 57 of | GCCCAGAAATTCCAGGGC | GGACTCTACTCCCTCAGC |
| | ATCTGCAACTACGCCCAGAAATTCC | GLYSLSSVVTVPSSSLGTQTYI | SEQ ID | AGAGTGACCATGACCGTG | AGCGTGGTGACCGTGCCC |
| | AGGGCAGAGTGACCATGACCGTGGA | CNVNHKPSNTKVDKKVEPKSCD | NO: 226) | GACACCTCCACCAGCACC | TCCAGCAGCTTGGGCACC |
| | CACCTCCACCAGCACCGCCTACATG | KTHTCPPCPAPELLGGPSVFLF | [SEQ ID | GCCTACATGGAACTGTCC | CAGACCTACATCTGCAAC |
| | GAACTGTCCTCCCTGCGGAGCGAGG | PPKPKDTLMISRTPEVTCVVVD | NO: 230] | TCCCTGCGGAGCGAGGAC | GTGAATCACAAGCCCAGC |
| | ACACCGCCGTGTACTACTGCGCTAG | VSHEDPEVKFNWYVDGVEVHNA | | ACCGCCGTGTACTACTGC | AACACCAAGGTGGACAAG |
| | AGAGGACGGCTACGACGCTTGGTTT | KTKPREEQYNSTYRVVSVLTVL | | GCTAGAGAGGACGGCTAC | AAAGTTGAGCCCAAATCT |
| | GCCTACTGGGGCCAGGGCACCCTCG | HQDWLNGKEYKCKVSNKALPAP | | GACGCTTGGTTTGCCTAC | TGTGACAAAACTCACACA |
| | TGACCGTGTCATCTGCATCCACCAA | IEKTISKAKGQPREPQVYTLPP | | TGGGGCCAGGGCACCCTC | TGCCCACCGTGCCCAGCA |
| | GGGCCCATCGGTCTTCCCCCTGGCA | SRDELTKNQVSLTCLVKGFYPS | | GTGACCGTGTCATCT | CCTGAACTCCTGGGGGGA |
| | CCCTCCTCCAAGAGCACCTCTGGGG | DIAVEWESNGQPENNYKTTPPV | | (Nucleotides 58 to | CCGTCAGTCTTCCTCTTC |
| | GCACAGCGGCCCTGGGCTGCCTGGT | LDSDGSFFLYSKLTVDKSRWQQ | | 414 of SEQ ID NO: | CCCCCAAAACCCAAGGAC |
| | CAAGGACTACTTCCCCGAACCGGTG | GNVFSCSVMHEALHNHYTQKSL | | 226) | ACCCTCATGATCTCCCGG |
| | ACGGTGTCGTGGAACTCAGGCGCCC | SLSPGK | | [SEQ ID NO: 231] | ACCCCTGAGGTCACATGC |
| | TGACCAGCGGCGTGCACACCTTCCC | Without leader [SEQ ID | | QVQLVQSGAEVKKPGASV | GTGGTGGTGGACGTGAGC |
| | GGCTGTCCTACAGTCCTCAGGACTC | NO: 229]: | | KVSCKASGYTFTTYWITW | CACGAAGACCCTGAGGTC |
| | TACTCCCTCAGCAGCGTGGTGACCG | QVQLVQSGAEVKKPGASVKVSC | | VRQAPGQGLEWMGDIYPG | AAGTTCAACTGGTACGTG |
| | TGCCCTCCAGCAGCTTGGGCACCCA | KASGYTFTTYWITWVRQAPGQG | | SSICNYAQKFQGRVTMTV | GACGGCGTGGAGGTGCAT |
| | GACCTACATCTGCAACGTGAATCAC | LEWMGDIYPGSSICNYAQKFQG | | DTSTSTAYMELSSLRSED | AATGCCAAGACAAAGCCG |
| | AAGCCCAGCAACACCAAGGTGGACA | RVTMTVDTSTSTAYMELSSLRS | | TAVYYCAREDGYDAWFAY | CGGGAGGAGCAGTACAAC |
| | AGAAAGTTGAGCCCAAATCTTGTGA | EDTAVYYCAREDGYDAWFAYWG | | WGQGTLVTVSS | AGCACGTACCGTGTGGTC |
| | CAAAACTCACACATGCCCACCGTGC | QGTLVTVSSASTKGPSVFPLAP | | [SEQ ID NO: 232] | AGCGTCCTCACCGTCCTG |
| | CCAGCACCTGAACTCCTGGGGGGAC | SSKSTSGGTAALGCLVKDYFPE | | | CACCAGGACTGGCTGAAT |
| | CGTCAGTCTTCCTCTTCCCCCCAAA | PVTVSWNSGALTSGVHTFPAVL | | | GGCAAGGAGTACAAGTGC |
| | ACCCAAGGACACCCTCATGATCTCC | QSSGLYSLSSVVTVPSSSLGTQ | | | AAGGTCTCCAACAAAGCC |
| | CGGACCCCTGAGGTCACATGCGTGG | TYICNVNHKPSNTKVDKKVEPK | | | CTCCCAGCCCCCATCGAG |
| | TGGTGGACGTGAGCCACGAAGACCC | SCDKTHTCPPCPAPELLGGPSV | | | AAAACCATCTCCAAAGCC |
| | TGAGGTCAAGTTCAACTGGTACGTG | FLFPPKPKDTLMISRTPEVTCV | | | AAAGGGCAGCCCCGAGAA |
| | GACGGCGTGGAGGTGCATAATGCCA | VVDVSHEDPEVKFNWYVDGVEV | | | CCACAGGTGTACACCCTG |
| | AGACAAAGCCGCGGGAGGAGCAGTA | HNAKTKPREEQYNSTYRVVSVL | | | CCCCCATCCCGGGATGAG |
| | CAACAGCACGTACCGTGTGGTCAGC | TVLHQDWLNGKEYKCKVSNKAL | | | CTGACCAAGAACCAGGTC |
| | GTCCTCACCGTCCTGCACCAGGACT | PAPIEKTISKAKGQPREPQVYT | | | AGCCTGACCTGCCTGGTC |
| | GGCTGAATGGCAAGGAGTACAAGTG | LPPSRDELTKNQVSLTCLVKGF | | | AAAGGCTTCTATCCCAGC |
| | CAAGGTCTCCAACAAAGCCCTCCCA | YPSDIAVEWESNGQPENNYKTT | | | GACATCGCCGTGGAGTGG |
| | GCCCCCATCGAGAAAACCATCTCCA | PPVLDSDGSFFLYSKLTVDKSR | | | GAGAGCAATGGGCAGCCG |
| | AAGCCAAAGGGCAGCCCCGAGAACC | WQQGNVFSCSVMHEALHNHYTQ | | | GAGAACAACTACAAGACC |
| | ACAGGTGTACACCCTGCCCCCATCC | KSLSLSPGK | | | ACGCCTCCCGTGCTGGAC |
| | CGGGATGAGCTGACCAAGAACCAGG | | | | TCCGACGGCTCCTTCTTC |
| | TCAGCCTGACCTGCCTGGTCAAAGG | | | | TTATATTCAAAGCTCACC |
| | CTTCTATCCCAGCGACATCGCCGTG | | | | GTGGACAAGAGCAGGTGG |
| | GAGTGGGAGAGCAATGGGCAGCCGG | | | | CAGCAGGGGAACGTCTTC |
| | AGAACAACTACAAGACCACGCCTCC | | | | TCATGCTCCGTGATGCAT |
| | CGTGCTGGACTCCGACGGCTCCTTC | | | | GAGGCTCTGCACAACCAC |
| | TTCTTATATTCAAAGCTCACCGTGG | | | | TACACGCAGAAGAGCCTC |
| | ACAAGAGCAGGTGGCAGCAGGGGAA | | | | TCCCTGTCTCCCGGG |
| | CGTCTTCTCATGCTCCGTGATGCAT | | | | (Nucleotides 415 |
| | GAGGCTCTGCACAACCACTACACGC | | | | to 1401) |
| | AGAAGAGCCTCTCCCTGTCTCCCGG | | | | [SEQ ID NO: 233] |
| | GAAATGA | | | | ASTKGPSVFPLAPSSKST |
| | Without leader [SEQ ID | | | | SGGTAALGCLVKDYFPEP |
| | NO: 227]: | | | | VTVSWNSGALTSGVHTFP |
| | CAGGTGCAGCTGGTGCAGTCTGGCG | | | | AVLQSSGLYSLSSVVTVP |
| | CCGAAGTGAAGAAACCTGGCGCCTC | | | | SSSLGTQTYICNVNHKPS |
| | CGTGAAGGTGTCCTGCAAGGCTTCC | | | | NTKVDKKVEPKSCDKTHT |
| | GGCTACACCTTTACCACCTACTGGA | | | | CPPCPAPELLGGPSVFLF |
| | TCACCTGGGTGCGACAGGCTCCTGG | | | | PPKPKDTLMISRTPEVTC |
| | ACAGGGCCTGGAATGGATGGGCGAC | | | | VVVDVSHEDPEVKFNWYV |
| | ATCTACCCCGGCTCCTCCATCTGCA | | | | DGVEVHNAKTKPREEQYN |
| | ACTACGCCCAGAAATTCCAGGGCAG | | | | STYRVVSVLTVLHQDWLN |
| | AGTGACCATGACCGTGGACACCTCC | | | | GKEYKCKVSNKALPAPIE |
| | ACCAGCACCGCCTACATGGAACTGT | | | | KTISKAKGQPREPQVYTL |
| | CCTCCCTGCGGAGCGAGGACACCGC | | | | PPSRDELTKNQVSLTCLV |
| | CGTGTACTACTGCGCTAGAGAGGAC | | | | KGFYPSDIAVEWESNGQP |
| | GGCTACGACGCTTGGTTTGCCTACT | | | | ENNYKTTPPVLDSDGSFF |
| | GGGGCCAGGGCACCCTCGTGACCGT | | | | LYSKLTVDKSRWQQGNVF |
| | GTCATCTGCATCCACCAAGGGCCCA | | | | SCSVMHEALHNHYTQKSL |
| | TCGGTCTTCCCCCTGGCACCCTCCT | | | | SLSPGK |
| | CCAAGAGCACCTCTGGGGGCACAGC | | | | [SEQ ID NO: 234] |
| | GGCCCTGGGCTGCCTGGTCAAGGAC | | | | |
| | TACTTCCCCGAACCGGTGACGGTGT | | | | |
| | CGTGGAACTCAGGCGCCCTGACCAG | | | | |
| | CGGCGTGCACACCTTCCCGGCTGTC | | | | |
| | CTACAGTCCTCAGGACTCTACTCCC | | | | |
| | TCAGCAGCGTGGTGACCGTGCCCTC | | | | |
| | CAGCAGCTTGGGCACCCAGACCTAC | | | | |
| | ATCTGCAACGTGAATCACAAGCCCA | | | | |
| | GCAACACCAAGGTGGACAAGAAAGT | | | | |
| | TGAGCCCAAATCTTGTGACAAAACT | | | | |
| | CACACATGCCCACCGTGCCCAGCAC | | | | |
| | CTGAACTCCTGGGGGGACCGTCAGT | | | | |
| | CTTCCTCTTCCCCCCAAAACCCAAG | | | | |
| | GACACCCTCATGATCTCCCGGACCC | | | | |
| | CTGAGGTCACATGCGTGGTGGTGGA | | | | |
| | CGTGAGCCACGAAGACCCTGAGGTC | | | | |
| | AAGTTCAACTGGTACGTGGACGGCG | | | | |
| | TGGAGGTGCATAATGCCAAGACAAA | | | | |
| | GCCGCGGGAGGAGCAGTACAACAGC | | | | |
| | ACGTACCGTGTGGTCAGCGTCCTCA | | | | |
| | CCGTCCTGCACCAGGACTGGCTGAA | | | | |
| | TGGCAAGGAGTACAAGTGCAAGGTC | | | | |
| | TCCAACAAAGCCCTCCCAGCCCCCA | | | | |
| | TCGAGAAAACCATCTCCAAAGCCAA | | | | |
| | AGGGCAGCCCCGAGAACCACAGGTG | | | | |
| | TACACCCTGCCCCCATCCCGGGATG | | | | |
| | AGCTGACCAAGAACCAGGTCAGCCT | | | | |
| | GACCTGCCTGGTCAAAGGCTTCTAT | | | | |
| | CCCAGCGACATCGCCGTGGAGTGGG | | | | |
| | AGAGCAATGGGCAGCCGGAGAACAA | | | | |
| | CTACAAGACCACGCCTCCCGTGCTG | | | | |
| | GACTCCGACGGCTCCTTCTTCTTAT | | | | |
| | ATTCAAAGCTCACCGTGGACAAGAG | | | | |
| | CAGGTGGCAGCAGGGGAACGTCTTC | | | | |
| | TCATGCTCCGTGATGCATGAGGCTC | | | | |
| | TGCACAACCACTACACGCAGAAGAG | | | | |
| | CCTCTCCCTGTCTCCCGGGAAATGA | | | | |
| 7G6- | With leader [SEQ ID NO: | With leader [SEQ ID | ATGGGCTG | CAGGTGCAGCTGGTGCAG | GCATCCACCAAGGGCCCA |
| HCzu5 | 235]: | NO: 237]: | GTCCTGCA | TCTGGCGCCGAAGTGAAG | TCGGTCTTCCCCCTGGCA |
| | ATGGGCTGGTCCTGCATCATCCTGT | MGWSCIILFLVATATGVHSQVQ | TCATCCTG | AAACCTGGCGCCTCCGTG | CCCTCCTCCAAGAGCACC |
| | TTCTGGTGGCCACCGCCACCGGCGT | LVQSGAEVKKPGASVKVSCKAS | TTTCTGGT | AAGGTGTCCTGCAAGGCT | TCTGGGGGCACAGCGGCC |
| | GCACAGCCAGGTGCAGCTGGTGCAG | GYTFTTYWITWVRQAPGQGLEW | GGCCACCG | TCCGGCTACACCTTTACC | CTGGGCTGCCTGGTCAAG |
| | TCTGGCGCCGAAGTGAAGAAACCTG | MGDIYPGSSISNYNEKFKSRVT | CCACCGGC | ACCTACTGGATCACCTGG | GACTACTTCCCCGAACCG |
| | GCGCCTCCGTGAAGGTGTCCTGCAA | MTVDTSTSTAYMELSSLRSEDT | GTGCACAG | GTGCGACAGGCTCCTGGA | GTGACGGTGTCGTGGAAC |
| | GGCTTCCGGCTACACCTTTACCACC | AVYYCAREDGYDAWFAYWGQGT | C | CAGGGCCTGGAATGGATG | TCAGGCGCCCTGACCAGC |
| | TACTGGATCACCTGGGTGCGACAGG | LVTVSSASTKGPSVFPLAPSSK | (Nucleo- | GGCGACATCTACCCCGGC | GGCGTGCACACCTTCCCG |
| | CTCCTGGACAGGGCCTGGAATGGAT | STSGGTAALGCLVKDYFPEPVT | tides 1 | TCCTCCATCTCCAACTAC | GCTGTCCTACAGTCCTCA |
| | GGGCGACATCTACCCCGGCTCCTCC | VSWNSGALTSGVHTFPAVLQSS | to 57 of | AACGAGAAGTTCAAGTCC | GGACTCTACTCCCTCAGC |
| | ATCTCCAACTACAACGAGAAGTTCA | GLYSLSSVVTVPSSSLGTQTYI | SEQ ID | CGCGTGACCATGACCGTG | AGCGTGGTGACCGTGCCC |
| | AGTCCCGCGTGACCATGACCGTGGA | CNVNHKPSNTKVDKKVEPKSCD | NO: 235) | GACACCTCCACCAGCACC | TCCAGCAGCTTGGGCACC |
| | CACCTCCACCAGCACCGCCTACATG | KTHTCPPCPAPELLGGPSVFLF | [SEQ ID | GCCTACATGGAACTGTCC | CAGACCTACATCTGCAAC |
| | GAACTGTCCTCCCTGCGGAGCGAGG | PPKPKDTLMISRTPEVTCVVVD | NO: 239] | TCCCTGCGGAGCGAGGAC | GTGAATCACAAGCCCAGC |
| | ACACCGCCGTGTACTACTGCGCTAG | VSHEDPEVKFNWYVDGVEVHNA | | ACCGCCGTGTACTACTGC | AACACCAAGGTGGACAAG |
| | AGAGGACGGCTACGACGCTTGGTTT | KTKPREEQYNSTYRVVSVLTVL | | GCTAGAGAGGACGGCTAC | AAAGTTGAGCCCAAATCT |
| | GCCTACTGGGGCCAGGGCACCCTCG | HQDWLNGKEYKCKVSNKALPAP | | GACGCTTGGTTTGCCTAC | TGTGACAAAACTCACACA |
| | TGACCGTGTCATCTGCATCCACCAA | IEKTISKAKGQPREPQVYTLPP | | TGGGGCCAGGGCACCCTC | TGCCCACCGTGCCCAGCA |
| | GGGCCCATCGGTCTTCCCCCTGGCA | SRDELTKNQVSLTCLVKGFYPS | | GTGACCGTGTCATCT | CCTGAACTCCTGGGGGGA |
| | CCCTCCTCCAAGAGCACCTCTGGGG | DIAVEWESNGQPENNYKTTPPV | | (Nucleotides 58 to | CCGTCAGTCTTCCTCTTC |
| | GCACAGCGGCCCTGGGCTGCCTGGT | LDSDGSFFLYSKLTVDKSRWQQ | | 414 of SEQ ID NO: | CCCCCAAAACCCAAGGAC |
| | CAAGGACTACTTCCCCGAACCGGTG | GNVFSCSVMHEALHNHYTQKSL | | 235) | ACCCTCATGATCTCCCGG |
| | ACGGTGTCGTGGAACTCAGGCGCCC | SLSPGK | | [SEQ ID NO: 240] | ACCCCTGAGGTCACATGC |
| | TGACCAGCGGCGTGCACACCTTCCC | Without leader [SEQ ID | | QVQLVQSGAEVKKPGASV | GTGGTGGTGGACGTGAGC |
| | GGCTGTCCTACAGTCCTCAGGACTC | NO: 238]: | | KVSCKASGYTFTTYWITW | CACGAAGACCCTGAGGTC |
| | TACTCCCTCAGCAGCGTGGTGACCG | QVQLVQSGAEVKKPGASVKVSC | | VRQAPGQGLEWMGDIYPG | AAGTTCAACTGGTACGTG |
| | TGCCCTCCAGCAGCTTGGGCACCCA | KASGYTFTTYWITWVRQAPGQG | | SSISNYNEKFKSRVTMTV | GACGGCGTGGAGGTGCAT |
| | GACCTACATCTGCAACGTGAATCAC | LEWMGDIYPGSSISNYNEKFKS | | DTSTSTAYMELSSLRSED | AATGCCAAGACAAAGCCG |
| | AAGCCCAGCAACACCAAGGTGGACA | RVTMTVDTSTSTAYMELSSLRS | | TAVYYCAREDGYDAWFAY | CGGGAGGAGCAGTACAAC |
| | AGAAAGTTGAGCCCAAATCTTGTGA | EDTAVYYCAREDGYDAWFAYWG | | WGQGTLVTVSS | AGCACGTACCGTGTGGTC |
| | CAAAACTCACACATGCCCACCGTGC | QGTLVTVSSASTKGPSVFPLAP | | [SEQ ID NO: 241] | AGCGTCCTCACCGTCCTG |
| | CCAGCACCTGAACTCCTGGGGGGAC | SSKSTSGGTAALGCLVKDYFPE | | | CACCAGGACTGGCTGAAT |
| | CGTCAGTCTTCCTCTTCCCCCCAAA | PVTVSWNSGALTSGVHTFPAVL | | | GGCAAGGAGTACAAGTGC |
| | ACCCAAGGACACCCTCATGATCTCC | QSSGLYSLSSVVTVPSSSLGTQ | | | AAGGTCTCCAACAAAGCC |
| | CGGACCCCTGAGGTCACATGCGTGG | TYICNVNHKPSNTKVDKKVEPK | | | CTCCCAGCCCCCATCGAG |
| | TGGTGGACGTGAGCCACGAAGACCC | SCDKTHTCPPCPAPELLGGPSV | | | AAAACCATCTCCAAAGCC |
| | TGAGGTCAAGTTCAACTGGTACGTG | FLFPPKPKDTLMISRTPEVTCV | | | AAAGGGCAGCCCCGAGAA |
| | GACGGCGTGGAGGTGCATAATGCCA | VVDVSHEDPEVKFNWYVDGVEV | | | CCACAGGTGTACACCCTG |
| | AGACAAAGCCGCGGGAGGAGCAGTA | HNAKTKPREEQYNSTYRVVSVL | | | CCCCCATCCCGGGATGAG |
| | CAACAGCACGTACCGTGTGGTCAGC | TVLHQDWLNGKEYKCKVSNKAL | | | CTGACCAAGAACCAGGTC |
| | GTCCTCACCGTCCTGCACCAGGACT | PAPIEKTISKAKGQPREPQVYT | | | AGCCTGACCTGCCTGGTC |
| | GGCTGAATGGCAAGGAGTACAAGTG | LPPSRDELTKNQVSLTCLVKGF | | | AAAGGCTTCTATCCCAGC |
| | CAAGGTCTCCAACAAAGCCCTCCCA | YPSDIAVEWESNGQPENNYKTT | | | GACATCGCCGTGGAGTGG |
| | GCCCCCATCGAGAAAACCATCTCCA | PPVLDSDGSFFLYSKLTVDKSR | | | GAGAGCAATGGGCAGCCG |
| | AAGCCAAAGGGCAGCCCCGAGAACC | WQQGNVFSCSVMHEALHNHYTQ | | | GAGAACAACTACAAGACC |
| | ACAGGTGTACACCCTGCCCCCATCC | KSLSLSPGK | | | ACGCCTCCCGTGCTGGAC |
| | CGGGATGAGCTGACCAAGAACCAGG | | | | TCCGACGGCTCCTTCTTC |
| | TCAGCCTGACCTGCCTGGTCAAAGG | | | | TTATATTCAAAGCTCACC |
| | CTTCTATCCCAGCGACATCGCCGTG | | | | GTGGACAAGAGCAGGTGG |
| | GAGTGGGAGAGCAATGGGCAGCCGG | | | | CAGCAGGGGAACGTCTTC |
| | AGAACAACTACAAGACCACGCCTCC | | | | TCATGCTCCGTGATGCAT |
| | CGTGCTGGACTCCGACGGCTCCTTC | | | | GAGGCTCTGCACAACCAC |
| | TTCTTATATTCAAAGCTCACCGTGG | | | | TACACGCAGAAGAGCCTC |
| | ACAAGAGCAGGTGGCAGCAGGGGAA | | | | TCCCTGTCTCCCGGG |
| | CGTCTTCTCATGCTCCGTGATGCAT | | | | (Nucleotides 415 |
| | GAGGCTCTGCACAACCACTACACGC | | | | to 1401 of SEQ ID |
| | AGAAGAGCCTCTCCCTGTCTCCCGG | | | | NO: 235) |
| | GAAATGA | | | | [SEQ ID NO: 242] |
| | Without leader [SEQ ID | | | | ASTKGPSVFPLAPSSKST |
| | NO: 236]: | | | | SGGTAALGCLVKDYFPEP |
| | CAGGTGCAGCTGGTGCAGTCTGGCG | | | | VTVSWNSGALTSGVHTFP |
| | CCGAAGTGAAGAAACCTGGCGCCTC | | | | AVLQSSGLYSLSSVVTVP |
| | CGTGAAGGTGTCCTGCAAGGCTTCC | | | | SSSLGTQTYICNVNHKPS |
| | GGCTACACCTTTACCACCTACTGGA | | | | NTKVDKKVEPKSCDKTHT |
| | TCACCTGGGTGCGACAGGCTCCTGG | | | | CPPCPAPELLGGPSVFLF |
| | ACAGGGCCTGGAATGGATGGGCGAC | | | | PPKPKDTLMISRTPEVTC |
| | ATCTACCCCGGCTCCTCCATCTCCA | | | | VVVDVSHEDPEVKFNWYV |
| | ACTACAACGAGAAGTTCAAGTCCCG | | | | DGVEVHNAKTKPREEQYN |
| | CGTGACCATGACCGTGGACACCTCC | | | | STYRVVSVLTVLHQDWLN |
| | ACCAGCACCGCCTACATGGAACTGT | | | | GKEYKCKVSNKALPAPIE |
| | CCTCCCTGCGGAGCGAGGACACCGC | | | | KTISKAKGQPREPQVYTL |
| | CGTGTACTACTGCGCTAGAGAGGAC | | | | PPSRDELTKNQVSLTCLV |
| | GGCTACGACGCTTGGTTTGCCTACT | | | | KGFYPSDIAVEWESNGQP |
| | GGGGCCAGGGCACCCTCGTGACCGT | | | | ENNYKTTPPVLDSDGSFF |
| | GTCATCTGCATCCACCAAGGGCCCA | | | | LYSKLTVDKSRWQQGNVF |
| | TCGGTCTTCCCCCTGGCACCCTCCT | | | | SCSVMHEALHNHYTQKSL |
| | CCAAGAGCACCTCTGGGGGCACAGC | | | | SLSPGK |
| | GGCCCTGGGCTGCCTGGTCAAGGAC | | | | [SEQ ID NO: 243] |
| | TACTTCCCCGAACCGGTGACGGTGT | | | | |
| | CGTGGAACTCAGGCGCCCTGACCAG | | | | |
| | CGGCGTGCACACCTTCCCGGCTGTC | | | | |
| | CTACAGTCCTCAGGACTCTACTCCC | | | | |
| | TCAGCAGCGTGGTGACCGTGCCCTC | | | | |
| | CAGCAGCTTGGGCACCCAGACCTAC | | | | |
| | ATCTGCAACGTGAATCACAAGCCCA | | | | |
| | GCAACACCAAGGTGGACAAGAAAGT | | | | |
| | TGAGCCCAAATCTTGTGACAAAACT | | | | |
| | CACACATGCCCACCGTGCCCAGCAC | | | | |
| | CTGAACTCCTGGGGGGACCGTCAGT | | | | |
| | CTTCCTCTTCCCCCCAAAACCCAAG | | | | |
| | GACACCCTCATGATCTCCCGGACCC | | | | |
| | CTGAGGTCACATGCGTGGTGGTGGA | | | | |
| | CGTGAGCCACGAAGACCCTGAGGTC | | | | |
| | AAGTTCAACTGGTACGTGGACGGCG | | | | |
| | TGGAGGTGCATAATGCCAAGACAAA | | | | |
| | GCCGCGGGAGGAGCAGTACAACAGC | | | | |
| | ACGTACCGTGTGGTCAGCGTCCTCA | | | | |
| | CCGTCCTGCACCAGGACTGGCTGAA | | | | |
| | TGGCAAGGAGTACAAGTGCAAGGTC | | | | |
| | TCCAACAAAGCCCTCCCAGCCCCCA | | | | |
| | TCGAGAAAACCATCTCCAAAGCCAA | | | | |
| | AGGGCAGCCCCGAGAACCACAGGTG | | | | |
| | TACACCCTGCCCCCATCCCGGGATG | | | | |
| | AGCTGACCAAGAACCAGGTCAGCCT | | | | |
| | GACCTGCCTGGTCAAAGGCTTCTAT | | | | |
| | CCCAGCGACATCGCCGTGGAGTGGG | | | | |
| | AGAGCAATGGGCAGCCGGAGAACAA | | | | |
| | CTACAAGACCACGCCTCCCGTGCTG | | | | |
| | GACTCCGACGGCTCCTTCTTCTTAT | | | | |
| | ATTCAAAGCTCACCGTGGACAAGAG | | | | |
| | CAGGTGGCAGCAGGGGAACGTCTTC | | | | |
| | TCATGCTCCGTGATGCATGAGGCTC | | | | |
| | TGCACAACCACTACACGCAGAAGAG | | | | |
| | CCTCTCCCTGTCTCCCGGGAAATGA | | | | |
| 7G6- | With leader [SEQ ID NO: | With leader [SEQ ID | ATGGGCTG | CAGGTGCAGCTGGTGCAG | GCATCCACCAAGGGCCCA |
| HCzu6 | 244]: | NO: 246]: | GTCCTGCA | TCTGGCGCCGAAGTGAAG | TCGGTCTTCCCCCTGGCA |
| | ATGGGCTGGTCCTGCATCATCCTGT | MGWSCIILFLVATATGVHSQVQ | TCATCCTG | AAACCTGGCGCCTCCGTG | CCCTCCTCCAAGAGCACC |
| | TTCTGGTGGCCACCGCCACCGGCGT | LVQSGAEVKKPGASVKVSCKAS | TTTCTGGT | AAGGTGTCCTGCAAGGCT | TCTGGGGGCACAGCGGCC |
| | GCACAGCCAGGTGCAGCTGGTGCAG | GYTFTTYWITWVRQAPGQGLEW | GGCCACCG | TCCGGCTACACCTTTACC | CTGGGCTGCCTGGTCAAG |
| | TCTGGCGCCGAAGTGAAGAAACCTG | MGDIYPGSSISNYNEKFKSRVT | CCACCGGC | ACCTACTGGATCACCTGG | GACTACTTCCCCGAACCG |
| | GCGCCTCCGTGAAGGTGTCCTGCAA | MTVDTSTSTVYMELSSLRSEDT | GTGCACAG | GTGCGACAGGCTCCTGGA | GTGACGGTGTCGTGGAAC |
| | GGCTTCCGGCTACACCTTTACCACC | AVYYCAREDGYDAWFAYWGQGT | C | CAGGGCCTGGAATGGATG | TCAGGCGCCCTGACCAGC |
| | TACTGGATCACCTGGGTGCGACAGG | LVTVSSASTKGPSVFPLAPSSK | (Nucleo- | GGCGACATCTACCCCGGC | GGCGTGCACACCTTCCCG |
| | CTCCTGGACAGGGCCTGGAATGGAT | STSGGTAALGCLVKDYFPEPVT | tides 1 | TCCTCCATCTCCAACTAC | GCTGTCCTACAGTCCTCA |
| | GGGCGACATCTACCCCGGCTCCTCC | VSWNSGALTSGVHTFPAVLQSS | to 57 of | AACGAGAAGTTCAAGTCC | GGACTCTACTCCCTCAGC |
| | ATCTCCAACTACAACGAGAAGTTCA | GLYSLSSVVTVPSSSLGTQTYI | SEQ ID | CGCGTGACCATGACCGTG | AGCGTGGTGACCGTGCCC |
| | AGTCCCGCGTGACCATGACCGTGGA | CNVNHKPSNTKVDKKVEPKSCD | NO: 244) | GACACCTCCACCAGCACC | TCCAGCAGCTTGGGCACC |
| | CACCTCCACCAGCACCGTGTACATG | KTHTCPPCPAPELLGGPSVFLF | [SEQ ID | GTGTACATGGAACTGTCC | CAGACCTACATCTGCAAC |
| | GAACTGTCCTCCCTGCGGAGCGAGG | PPKPKDTLMISRTPEVTCVVVD | NO: 248] | TCCCTGCGGAGCGAGGAC | GTGAATCACAAGCCCAGC |
| | ACACCGCCGTGTACTACTGCGCTAG | VSHEDPEVKFNWYVDGVEVHNA | | ACCGCCGTGTACTACTGC | AACACCAAGGTGGACAAG |
| | AGAGGACGGCTACGACGCTTGGTTT | KTKPREEQYNSTYRVVSVLTVL | | GCTAGAGAGGACGGCTAC | AAAGTTGAGCCCAAATCT |
| | GCCTACTGGGGCCAGGGCACCCTCG | HQDWLNGKEYKCKVSNKALPAP | | GACGCTTGGTTTGCCTAC | TGTGACAAAACTCACACA |
| | TGACCGTGTCATCTGCATCCACCAA | IEKTISKAKGQPREPQVYTLPP | | TGGGGCCAGGGCACCCTC | TGCCCACCGTGCCCAGCA |
| | GGGCCCATCGGTCTTCCCCCTGGCA | SRDELTKNQVSLTCLVKGFYPS | | GTGACCGTGTCATCT | CCTGAACTCCTGGGGGGA |
| | CCCTCCTCCAAGAGCACCTCTGGGG | DIAVEWESNGQPENNYKTTPPV | | (Nucleotides 58 to | CCGTCAGTCTTCCTCTTC |
| | GCACAGCGGCCCTGGGCTGCCTGGT | LDSDGSFFLYSKLTVDKSRWQQ | | 414 of SEQ ID NO: | CCCCCAAAACCCAAGGAC |
| | CAAGGACTACTTCCCCGAACCGGTG | GNVFSCSVMHEALHNHYTQKSL | | 244) | ACCCTCATGATCTCCCGG |
| | ACGGTGTCGTGGAACTCAGGCGCCC | SLSPGK | | [SEQ ID NO: 249] | ACCCCTGAGGTCACATGC |
| | TGACCAGCGGCGTGCACACCTTCCC | Without leader [SEQ ID | | QVQLVQSGAEVKKPGASV | GTGGTGGTGGACGTGAGC |
| | GGCTGTCCTACAGTCCTCAGGACTC | NO: 247]: | | KVSCKASGYTFTTYWITW | CACGAAGACCCTGAGGTC |
| | TACTCCCTCAGCAGCGTGGTGACCG | QVQLVQSGAEVKKPGASVKVSC | | VRQAPGQGLEWMGDIYPG | AAGTTCAACTGGTACGTG |
| | TGCCCTCCAGCAGCTTGGGCACCCA | KASGYTFTTYWITWVRQAPGQG | | SSISNYNEKFKSRVTMTV | GACGGCGTGGAGGTGCAT |
| | GACCTACATCTGCAACGTGAATCAC | LEWMGDIYPGSSISNYNEKFKS | | DTSTSTVYMELSSLRSED | AATGCCAAGACAAAGCCG |
| | AAGCCCAGCAACACCAAGGTGGACA | RVTMTVDTSTSTVYMELSSLRS | | TAVYYCAREDGYDAWFAY | CGGGAGGAGCAGTACAAC |
| | AGAAAGTTGAGCCCAAATCTTGTGA | EDTAVYYCAREDGYDAWFAYWG | | WGQGTLVTVSS | AGCACGTACCGTGTGGTC |
| | CAAAACTCACACATGCCCACCGTGC | QGTLVTVSSASTKGPSVFPLAP | | [SEQ ID NO: 250] | AGCGTCCTCACCGTCCTG |
| | CCAGCACCTGAACTCCTGGGGGGAC | SSKSTSGGTAALGCLVKDYFPE | | | CACCAGGACTGGCTGAAT |
| | CGTCAGTCTTCCTCTTCCCCCCAAA | PVTVSWNSGALTSGVHTFPAVL | | | GGCAAGGAGTACAAGTGC |
| | ACCCAAGGACACCCTCATGATCTCC | QSSGLYSLSSVVTVPSSSLGTQ | | | AAGGTCTCCAACAAAGCC |
| | CGGACCCCTGAGGTCACATGCGTGG | TYICNVNHKPSNTKVDKKVEPK | | | CTCCCAGCCCCCATCGAG |
| | TGGTGGACGTGAGCCACGAAGACCC | SCDKTHTCPPCPAPELLGGPSV | | | AAAACCATCTCCAAAGCC |
| | TGAGGTCAAGTTCAACTGGTACGTG | FLFPPKPKDTLMISRTPEVTCV | | | AAAGGGCAGCCCCGAGAA |
| | GACGGCGTGGAGGTGCATAATGCCA | VVDVSHEDPEVKFNWYVDGVEV | | | CCACAGGTGTACACCCTG |
| | AGACAAAGCCGCGGGAGGAGCAGTA | HNAKTKPREEQYNSTYRVVSVL | | | CCCCCATCCCGGGATGAG |
| | CAACAGCACGTACCGTGTGGTCAGC | TVLHQDWLNGKEYKCKVSNKAL | | | CTGACCAAGAACCAGGTC |
| | GTCCTCACCGTCCTGCACCAGGACT | PAPIEKTISKAKGQPREPQVYT | | | AGCCTGACCTGCCTGGTC |
| | GGCTGAATGGCAAGGAGTACAAGTG | LPPSRDELTKNQVSLTCLVKGF | | | AAAGGCTTCTATCCCAGC |
| | CAAGGTCTCCAACAAAGCCCTCCCA | YPSDIAVEWESNGQPENNYKTT | | | GACATCGCCGTGGAGTGG |
| | GCCCCCATCGAGAAAACCATCTCCA | PPVLDSDGSFFLYSKLTVDKSR | | | GAGAGCAATGGGCAGCCG |
| | AAGCCAAAGGGCAGCCCCGAGAACC | WQQGNVFSCSVMHEALHNHYTQ | | | GAGAACAACTACAAGACC |
| | ACAGGTGTACACCCTGCCCCCATCC | KSLSLSPGK | | | ACGCCTCCCGTGCTGGAC |
| | CGGGATGAGCTGACCAAGAACCAGG | | | | TCCGACGGCTCCTTCTTC |
| | TCAGCCTGACCTGCCTGGTCAAAGG | | | | TTATATTCAAAGCTCACC |
| | CTTCTATCCCAGCGACATCGCCGTG | | | | GTGGACAAGAGCAGGTGG |
| | GAGTGGGAGAGCAATGGGCAGCCGG | | | | CAGCAGGGGAACGTCTTC |
| | AGAACAACTACAAGACCACGCCTCC | | | | TCATGCTCCGTGATGCAT |
| | CGTGCTGGACTCCGACGGCTCCTTC | | | | GAGGCTCTGCACAACCAC |
| | TTCTTATATTCAAAGCTCACCGTGG | | | | TACACGCAGAAGAGCCTC |
| | ACAAGAGCAGGTGGCAGCAGGGGAA | | | | TCCCTGTCTCCCGGG |
| | CGTCTTCTCATGCTCCGTGATGCAT | | | | (Nucleotides 415 |
| | GAGGCTCTGCACAACCACTACACGC | | | | to 1401) |
| | AGAAGAGCCTCTCCCTGTCTCCCGG | | | | [SEQ ID NO: 251] |
| | GAAATGA | | | | ASTKGPSVFPLAPSSKST |
| | Without leader [SEQ ID | | | | SGGTAALGCLVKDYFPEP |
| | NO: 245]: | | | | VTVSWNSGALTSGVHTFP |
| | CAGGTGCAGCTGGTGCAGTCTGGCG | | | | AVLQSSGLYSLSSVVTVP |
| | CCGAAGTGAAGAAACCTGGCGCCTC | | | | SSSLGTQTYICNVNHKPS |
| | CGTGAAGGTGTCCTGCAAGGCTTCC | | | | NTKVDKKVEPKSCDKTHT |
| | GGCTACACCTTTACCACCTACTGGA | | | | CPPCPAPELLGGPSVFLF |
| | TCACCTGGGTGCGACAGGCTCCTGG | | | | PPKPKDTLMISRTPEVTC |
| | ACAGGGCCTGGAATGGATGGGCGAC | | | | VVVDVSHEDPEVKFNWYV |
| | ATCTACCCCGGCTCCTCCATCTCCA | | | | DGVEVHNAKTKPREEQYN |
| | ACTACAACGAGAAGTTCAAGTCCCG | | | | STYRVVSVLTVLHQDWLN |
| | CGTGACCATGACCGTGGACACCTCC | | | | GKEYKCKVSNKALPAPIE |
| | ACCAGCACCGTGTACATGGAACTGT | | | | KTISKAKGQPREPQVYTL |
| | CCTCCCTGCGGAGCGAGGACACCGC | | | | PPSRDELTKNQVSLTCLV |
| | CGTGTACTACTGCGCTAGAGAGGAC | | | | KGFYPSDIAVEWESNGQP |
| | GGCTACGACGCTTGGTTTGCCTACT | | | | ENNYKTTPPVLDSDGSFF |
| | GGGGCCAGGGCACCCTCGTGACCGT | | | | LYSKLTVDKSRWQQGNVF |
| | GTCATCTGCATCCACCAAGGGCCCA | | | | SCSVMHEALHNHYTQKSL |
| | TCGGTCTTCCCCCTGGCACCCTCCT | | | | SLSPGK |
| | CCAAGAGCACCTCTGGGGGCACAGC | | | | [SEQ ID NO: 252] |
| | GGCCCTGGGCTGCCTGGTCAAGGAC | | | | |
| | TACTTCCCCGAACCGGTGACGGTGT | | | | |
| | CGTGGAACTCAGGCGCCCTGACCAG | | | | |
| | CGGCGTGCACACCTTCCCGGCTGTC | | | | |
| | CTACAGTCCTCAGGACTCTACTCCC | | | | |
| | TCAGCAGCGTGGTGACCGTGCCCTC | | | | |
| | CAGCAGCTTGGGCACCCAGACCTAC | | | | |
| | ATCTGCAACGTGAATCACAAGCCCA | | | | |
| | GCAACACCAAGGTGGACAAGAAAGT | | | | |
| | TGAGCCCAAATCTTGTGACAAAACT | | | | |
| | CACACATGCCCACCGTGCCCAGCAC | | | | |
| | CTGAACTCCTGGGGGGACCGTCAGT | | | | |
| | CTTCCTCTTCCCCCCAAAACCCAAG | | | | |
| | GACACCCTCATGATCTCCCGGACCC | | | | |
| | CTGAGGTCACATGCGTGGTGGTGGA | | | | |
| | CGTGAGCCACGAAGACCCTGAGGTC | | | | |
| | AAGTTCAACTGGTACGTG | | | | |
| | GACGGCGTGGAGGTGCATAATGCCA | | | | |
| | AGACAAAGCCGCGGGAGGAGCAGTA | | | | |
| | CAACAGCACGTACCGTGTGGTCAGC | | | | |
| | GTCCTCACCGTCCTGCACCAGGACT | | | | |
| | GGCTGAATGGCAAGGAGTACAAGTG | | | | |
| | CAAGGTCTCCAACAAAGCCCTCCCA | | | | |
| | GCCCCCATCGAGAAAACCATCTCCA | | | | |
| | AAGCCAAAGGGCAGCCCCGAGAACC | | | | |
| | ACAGGTGTACACCCTGCCCCCATCC | | | | |
| | CGGGATGAGCTGACCAAGAACCAGG | | | | |
| | TCAGCCTGACCTGCCTGGTCAAAGG | | | | |
| | CTTCTATCCCAGCGACATCGCCGTG | | | | |
| | GAGTGGGAGAGCAATGGGCAGCCGG | | | | |
| | AGAACAACTACAAGACCACGCCTCC | | | | |
| | CGTGCTGGACTCCGACGGCTCCTTC | | | | |
| | TTCTTATATTCAAAGCTCACCGTGG | | | | |
| | ACAAGAGCAGGTGGCAGCAGGGGAA | | | | |
| | CGTCTTCTCATGCTCCGTGATGCAT | | | | |
| | GAGGCTCTGCACAACCACTACACGC | | | | |
| | AGAAGAGCCTCTCCCTGTCTCCCGG | | | | |
| | GAAATGA | | | | |
| 7G6- | With leader [SEQ ID NO: | With leader [SEQ ID | ATGGGCTG | CAGGTGCAGCTGGTGCAG | GCATCCACCAAGGGCCCA |
| HCzu7 | 253]: | NO: 255]: | GTCCTGCA | TCTGGCGCCGAAGTGAAG | TCGGTCTTCCCCCTGGCA |
| | ATGGGCTGGTCCTGCATCATCCTGT | MGWSCIILFLVATATGVHSQVQ | TCATCCTG | AAACCTGGCGCCTCCGTG | CCCTCCTCCAAGAGCACC |
| | TTCTGGTGGCCACCGCCACCGGCGT | LVQSGAEVKKPGASVKVSCKAS | TTTCTGGT | AAGGTGTCCTGCAAGGCT | TCTGGGGGCACAGCGGCC |
| | GCACAGCCAGGTGCAGCTGGTGCAG | GYTFTTYWITWVRQAPGQGLEW | GGCCACCG | TCCGGCTACACCTTTACC | CTGGGCTGCCTGGTCAAG |
| | TCTGGCGCCGAAGTGAAGAAACCTG | MGDIYPGSSISNYAQKFQGRVT | CCACCGGC | ACCTACTGGATCACCTGG | GACTACTTCCCCGAACCG |
| | GCGCCTCCGTGAAGGTGTCCTGCAA | MTVDTSTSTVYMELSSLRSEDT | GTGCACAG | GTGCGACAGGCTCCTGGA | GTGACGGTGTCGTGGAAC |
| | GGCTTCCGGCTACACCTTTACCACC | AVYYCAREDGYDAWFAYWGQGT | C | CAGGGCCTGGAATGGATG | TCAGGCGCCCTGACCAGC |
| | TACTGGATCACCTGGGTGCGACAGG | LVTVSSASTKGPSVFPLAPSSK | (Nucleo- | GGCGACATCTACCCCGGC | GGCGTGCACACCTTCCCG |
| | CTCCTGGACAGGGCCTGGAATGGAT | STSGGTAALGCLVKDYFPEPVT | tides 1 | TCCTCCATCTCCAACTAC | GCTGTCCTACAGTCCTCA |
| | GGGCGACATCTACCCCGGCTCCTCC | VSWNSGALTSGVHTFPAVLQSS | to 57 of | GCCCAGAAGTTCCAGGGC | GGACTCTACTCCCTCAGC |
| | ATCTCCAACTACGCCCAGAAGTTCC | GLYSLSSVVTVPSSSLGTQTYI | SEQ ID | CGCGTGACCATGACCGTG | AGCGTGGTGACCGTGCCC |
| | AGGGCCGCGTGACCATGACCGTGGA | CNVNHKPSNTKVDKKVEPKSCD | NO: 253) | GACACCTCCACCAGCACC | TCCAGCAGCTTGGGCACC |
| | CACCTCCACCAGCACCGTGTACATG | KTHTCPPCPAPELLGGPSVFLF | [SEQ ID | GTGTACATGGAACTGTCC | CAGACCTACATCTGCAAC |
| | GAACTGTCCTCCCTGCGGAGCGAGG | PPKPKDTLMISRTPEVTCVVVD | NO: 257] | TCCCTGCGGAGCGAGGAC | GTGAATCACAAGCCCAGC |
| | ACACCGCCGTGTACTACTGCGCTAG | VSHEDPEVKFNWYVDGVEVHNA | | ACCGCCGTGTACTACTGC | AACACCAAGGTGGACAAG |
| | AGAGGACGGCTACGACGCTTGGTTT | KTKPREEQYNSTYRVVSVLTVL | | GCTAGAGAGGACGGCTAC | AAAGTTGAGCCCAAATCT |
| | GCCTACTGGGGCCAGGGCACCCTCG | HQDWLNGKEYKCKVSNKALPAP | | GACGCTTGGTTTGCCTAC | TGTGACAAAACTCACACA |
| | TGACCGTGTCATCTGCATCCACCAA | IEKTISKAKGQPREPQVYTLPP | | TGGGGCCAGGGCACCCTC | TGCCCACCGTGCCCAGCA |
| | GGGCCCATCGGTCTTCCCCCTGGCA | SRDELTKNQVSLTCLVKGFYPS | | GTGACCGTGTCATCT | CCTGAACTCCTGGGGGGA |
| | CCCTCCTCCAAGAGCACCTCTGGGG | DIAVEWESNGQPENNYKTTPPV | | Nucleotides 58 to | CCGTCAGTCTTCCTCTTC |
| | GCACAGCGGCCCTGGGCTGCCTGGT | LDSDGSFFLYSKLTVDKSRWQQ | | 414 of SEQ ID NO: | CCCCCAAAACCCAAGGAC |
| | CAAGGACTACTTCCCCGAACCGGTG | GNVFSCSVMHEALHNHYTQKSL | | 253) | ACCCTCATGATCTCCCGG |
| | ACGGTGTCGTGGAACTCAGGCGCCC | SLSPGK | | [SEQ ID NO: 258] | ACCCCTGAGGTCACATGC |
| | TGACCAGCGGCGTGCACACCTTCCC | Without leader [SEQ ID | | QVQLVQSGAEVKKPGASV | GTGGTGGTGGACGTGAGC |
| | GGCTGTCCTACAGTCCTCAGGACTC | NO: 256]: | | KVSCKASGYTFTTYWITW | CACGAAGACCCTGAGGTC |
| | TACTCCCTCAGCAGCGTGGTGACCG | QVQLVQSGAEVKKPGASVKVSC | | VRQAPGQGLEWMGDIYPG | AAGTTCAACTGGTACGTG |
| | TGCCCTCCAGCAGCTTGGGCACCCA | KASGYTFTTYWITWVRQAPGQG | | SSISNYAQKFQGRVTMTV | GACGGCGTGGAGGTGCAT |
| | GACCTACATCTGCAACGTGAATCAC | LEWMGDIYPGSSISNYAQKFQG | | DTSTSTVYMELSSLRSED | AATGCCAAGACAAAGCCG |
| | AAGCCCAGCAACACCAAGGTGGACA | RVTMTVDTSTSTVYMELSSLRS | | TAVYYCAREDGYDAWFAY | CGGGAGGAGCAGTACAAC |
| | AGAAAGTTGAGCCCAAATCTTGTGA | EDTAVYYCAREDGYDAWFAYWG | | WGQGTLVTVSS | AGCACGTACCGTGTGGTC |
| | CAAAACTCACACATGCCCACCGTGC | QGTLVTVSSASTKGPSVFPLAP | | [SEQ ID NO: 259] | AGCGTCCTCACCGTCCTG |
| | CCAGCACCTGAACTCCTGGGGGGAC | SSKSTSGGTAALGCLVKDYFPE | | | CACCAGGACTGGCTGAAT |
| | CGTCAGTCTTCCTCTTCCCCCCAAA | PVTVSWNSGALTSGVHTFPAVL | | | GGCAAGGAGTACAAGTGC |
| | ACCCAAGGACACCCTCATGATCTCC | QSSGLYSLSSVVTVPSSSLGTQ | | | AAGGTCTCCAACAAAGCC |
| | CGGACCCCTGAGGTCACATGCGTGG | TYICNVNHKPSNTKVDKKVEPK | | | CTCCCAGCCCCCATCGAG |
| | TGGTGGACGTGAGCCACGAAGACCC | SCDKTHTCPPCPAPELLGGPSV | | | AAAACCATCTCCAAAGCC |
| | TGAGGTCAAGTTCAACTGGTACGTG | FLFPPKPKDTLMISRTPEVTCV | | | AAAGGGCAGCCCCGAGAA |
| | GACGGCGTGGAGGTGCATAATGCCA | VVDVSHEDPEVKFNWYVDGVEV | | | CCACAGGTGTACACCCTG |
| | AGACAAAGCCGCGGGAGGAGCAGTA | HNAKTKPREEQYNSTYRVVSVL | | | CCCCCATCCCGGGATGAG |
| | CAACAGCACGTACCGTGTGGTCAGC | TVLHQDWLNGKEYKCKVSNKAL | | | CTGACCAAGAACCAGGTC |
| | GTCCTCACCGTCCTGCACCAGGACT | PAPIEKTISKAKGQPREPQVYT | | | AGCCTGACCTGCCTGGTC |
| | GGCTGAATGGCAAGGAGTACAAGTG | LPPSRDELTKNQVSLTCLVKGF | | | AAAGGCTTCTATCCCAGC |
| | CAAGGTCTCCAACAAAGCCCTCCCA | YPSDIAVEWESNGQPENNYKTT | | | GACATCGCCGTGGAGTGG |
| | GCCCCCATCGAGAAAACCATCTCCA | PPVLDSDGSFFLYSKLTVDKSR | | | GAGAGCAATGGGCAGCCG |
| | AAGCCAAAGGGCAGCCCCGAGAACC | WQQGNVFSCSVMHEALHNHYTQ | | | GAGAACAACTACAAGACC |
| | ACAGGTGTACACCCTGCCCCCATCC | KSLSLSPGK | | | ACGCCTCCCGTGCTGGAC |
| | CGGGATGAGCTGACCAAGAACCAGG | | | | TCCGACGGCTCCTTCTTC |
| | TCAGCCTGACCTGCCTGGTCAAAGG | | | | TTATATTCAAAGCTCACC |
| | CTTCTATCCCAGCGACATCGCCGTG | | | | GTGGACAAGAGCAGGTGG |
| | GAGTGGGAGAGCAATGGGCAGCCGG | | | | CAGCAGGGGAACGTCTTC |
| | AGAACAACTACAAGACCACGCCTCC | | | | TCATGCTCCGTGATGCAT |
| | CGTGCTGGACTCCGACGGCTCCTTC | | | | GAGGCTCTGCACAACCAC |
| | TTCTTATATTCAAAGCTCACCGTGG | | | | TACACGCAGAAGAGCCTC |
| | ACAAGAGCAGGTGGCAGCAGGGGAA | | | | TCCCTGTCTCCCGGG |
| | CGTCTTCTCATGCTCCGTGATGCAT | | | | (Nucleotides 415 |
| | GAGGCTCTGCACAACCACTACACGC | | | | to 1401 of SEQ ID |
| | AGAAGAGCCTCTCCCTGTCTCCCGG | | | | NO: 253) |
| | GAAATGA | | | | [SEQ ID NO: 260] |
| | Without leader [SEQ ID | | | | ASTKGPSVFPLAPSSKST |
| | NO: 254]: | | | | SGGTAALGCLVKDYFPEP |
| | CAGGTGCAGCTGGTGCAGTCTGGCG | | | | VTVSWNSGALTSGVHTFP |
| | CCGAAGTGAAGAAACCTGGCGCCTC | | | | AVLQSSGLYSLSSVVTVP |
| | CGTGAAGGTGTCCTGCAAGGCTTCC | | | | SSSLGTQTYICNVNHKPS |
| | GGCTACACCTTTACCACCTACTGGA | | | | NTKVDKKVEPKSCDKTHT |
| | TCACCTGGGTGCGACAGGCTCCTGG | | | | CPPCPAPELLGGPSVFLF |
| | ACAGGGCCTGGAATGGATGGGCGAC | | | | PPKPKDTLMISRTPEVTC |
| | ATCTACCCCGGCTCCTCCATCTCCA | | | | VVVDVSHEDPEVKFNWYV |
| | ACTACGCCCAGAAGTTCCAGGGCCG | | | | DGVEVHNAKTKPREEQYN |
| | CGTGACCATGACCGTGGACACCTCC | | | | STYRVVSVLTVLHQDWLN |
| | ACCAGCACCGTGTACATGGAACTGT | | | | GKEYKCKVSNKALPAPIE |
| | CCTCCCTGCGGAGCGAGGACACCGC | | | | KTISKAKGQPREPQVYTL |
| | CGTGTACTACTGCGCTAGAGAGGAC | | | | PPSRDELTKNQVSLTCLV |
| | GGCTACGACGCTTGGTTTGCCTACT | | | | KGFYPSDIAVEWESNGQP |
| | GGGGCCAGGGCACCCTCGTGACCGT | | | | ENNYKTTPPVLDSDGSFF |
| | GTCATCTGCATCCACCAAGGGCCCA | | | | LYSKLTVDKSRWQQGNVF |
| | TCGGTCTTCCCCCTGGCACCCTCCT | | | | SCSVMHEALHNHYTQKSL |
| | CCAAGAGCACCTCTGGGGGCACAGC | | | | SLSPGK |
| | GGCCCTGGGCTGCCTGGTCAAGGAC | | | | [SEQ ID NO: 261] |
| | TACTTCCCCGAACCGGTGACGGTGT | | | | |
| | CGTGGAACTCAGGCGCCCTGACCAG | | | | |
| | CGGCGTGCACACCTTCCCGGCTGTC | | | | |
| | CTACAGTCCTCAGGACTCTACTCCC | | | | |
| | TCAGCAGCGTGGTGACCGTGCCCTC | | | | |
| | CAGCAGCTTGGGCACCCAGACCTAC | | | | |
| | ATCTGCAACGTGAATCACAAGCCCA | | | | |
| | GCAACACCAAGGTGGACAAGAAAGT | | | | |
| | TGAGCCCAAATCTTGTGACAAAACT | | | | |
| | CACACATGCCCACCGTGCCCAGCAC | | | | |
| | CTGAACTCCTGGGGGGACCGTCAGT | | | | |
| | CTTCCTCTTCCCCCCAAAACCCAAG | | | | |
| | GACACCCTCATGATCTCCCGGACCC | | | | |
| | CTGAGGTCACATGCGTGGTGGTGGA | | | | |
| | CGTGAGCCACGAAGACCCTGAGGTC | | | | |
| | AAGTTCAACTGGTACGTGGACGGCG | | | | |
| | TGGAGGTGCATAATGCCAAGACAAA | | | | |
| | GCCGCGGGAGGAGCAGTACAACAGC | | | | |
| | ACGTACCGTGTGGTCAGCGTCCTCA | | | | |
| | CCGTCCTGCACCAGGACTGGCTGAA | | | | |
| | TGGCAAGGAGTACAAGTGCAAGGTC | | | | |
| | TCCAACAAAGCCCTCCCAGCCCCCA | | | | |
| | TCGAGAAAACCATCTCCAAAGCCAA | | | | |
| | AGGGCAGCCCCGAGAACCACAGGTG | | | | |
| | TACACCCTGCCCCCATCCCGGGATG | | | | |
| | AGCTGACCAAGAACCAGGTCAGCCT | | | | |
| | GACCTGCCTGGTCAAAGGCTTCTAT | | | | |
| | CCCAGCGACATCGCCGTGGAGTGGG | | | | |
| | AGAGCAATGGGCAGCCGGAGAACAA | | | | |
| | CTACAAGACCACGCCTCCCGTGCTG | | | | |
| | GACTCCGACGGCTCCTTCTTCTTAT | | | | |
| | ATTCAAAGCTCACCGTGGACAAGAG | | | | |
| | CAGGTGGCAGCAGGGGAACGTCTTC | | | | |
| | TCATGCTCCGTGATGCATGAGGCTC | | | | |
| | TGCACAACCACTACACGCAGAAGAG | | | | |
| | CCTCTCCCTGTCTCCCGGGAAATGA | | | | |
| 7G6- | With leader [SEQ ID NO: | With leader [SEQ ID | ATGGGCTG | CAGGTGCAGCTGGTGCAG | GCATCCACCAAGGGCCCA |
| HCzu8 | 262]: | NO: 264]: | GTCCTGCA | TCTGGCGCCGAAGTGAAG | TCGGTCTTCCCCCTGGCA |
| | ATGGGCTGGTCCTGCATCATCCTGT | MGWSCIILFLVATATGVHSQVQ | TCATCCTG | AAACCTGGCGCCTCCGTG | CCCTCCTCCAAGAGCACC |
| | TTCTGGTGGCCACCGCCACCGGCGT | LVQSGAEVKKPGASVKVSCKAS | TTTCTGGT | AAGGTGTCCTGCAAGGCT | TCTGGGGGCACAGCGGCC |
| | GCACAGCCAGGTGCAGCTGGTGCAG | GYTFTTYWITWVRQAPGQGLEW | GGCCACCG | TCCGGCTACACCTTTACC | CTGGGCTGCCTGGTCAAG |
| | TCTGGCGCCGAAGTGAAGAAACCTG | MGDIYPGSSISNYAQKFQGRVT | CCACCGGC | ACCTACTGGATCACCTGG | GACTACTTCCCCGAACCG |
| | GCGCCTCCGTGAAGGTGTCCTGCAA | MTRDTSTSTVYMELSSLRSEDT | GTGCACAG | GTGCGACAGGCTCCTGGA | GTGACGGTGTCGTGGAAC |
| | GGCTTCCGGCTACACCTTTACCACC | AVYYCAREDGYDAWFAYWGQGT | C | CAGGGCCTGGAATGGATG | TCAGGCGCCCTGACCAGC |
| | TACTGGATCACCTGGGTGCGACAGG | LVTVSSASTKGPSVFPLAPSSK | (Nucleo- | GGCGACATCTACCCCGGC | GGCGTGCACACCTTCCCG |
| | CTCCTGGACAGGGCCTGGAATGGAT | STSGGTAALGCLVKDYFPEPVT | tides 1 | TCCTCCATCTCCAACTAC | GCTGTCCTACAGTCCTCA |
| | GGGCGACATCTACCCCGGCTCCTCC | VSWNSGALTSGVHTFPAVLQSS | to 57 of | GCCCAGAAGTTCCAGGGC | GGACTCTACTCCCTCAGC |
| | ATCTCCAACTACGCCCAGAAGTTCC | GLYSLSSVVTVPSSSLGTQTYI | SEQ ID | CGCGTGACCATGACCCGG | AGCGTGGTGACCGTGCCC |
| | AGGGCCGCGTGACCATGACCCGGGA | CNVNHKPSNTKVDKKVEPKSCD | NO: 262) | GACACCTCCACCAGCACC | TCCAGCAGCTTGGGCACC |
| | CACCTCCACCAGCACCGTGTACATG | KTHTCPPCPAPELLGGPSVFLF | [SEQ ID | GTGTACATGGAACTGTCC | CAGACCTACATCTGCAAC |
| | GAACTGTCCTCCCTGCGGAGCGAGG | PPKPKDTLMISRTPEVTCVVVD | NO: 266] | TCCCTGCGGAGCGAGGAC | GTGAATCACAAGCCCAGC |
| | ACACCGCCGTGTACTACTGCGCTAG | VSHEDPEVKFNWYVDGVEVHNA | | ACCGCCGTGTACTACTGC | AACACCAAGGTGGACAAG |
| | AGAGGACGGCTACGACGCTTGGTTT | KTKPREEQYNSTYRVVSVLTVL | | GCTAGAGAGGACGGCTAC | AAAGTTGAGCCCAAATCT |
| | GCCTACTGGGGCCAGGGCACCCTCG | HQDWLNGKEYKCKVSNKALPAP | | GACGCTTGGTTTGCCTAC | TGTGACAAAACTCACACA |
| | TGACCGTGTCATCTGCATCCACCAA | IEKTISKAKGQPREPQVYTLPP | | TGGGGCCAGGGCACCCTC | TGCCCACCGTGCCCAGCA |
| | GGGCCCATCGGTCTTCCCCCTGGCA | SRDELTKNQVSLTCLVKGFYPS | | GTGACCGTGTCATCT | CCTGAACTCCTGGGGGGA |
| | CCCTCCTCCAAGAGCACCTCTGGGG | DIAVEWESNGQPENNYKTTPPV | | (Nucleotides 58 to | CCGTCAGTCTTCCTCTTC |
| | GCACAGCGGCCCTGGGCTGCCTGGT | LDSDGSFFLYSKLTVDKSRWQQ | | 414 of SEQ ID NO: | CCCCCAAAACCCAAGGAC |
| | CAAGGACTACTTCCCCGAACCGGTG | GNVFSCSVMHEALHNHYTQKSL | | 262) | ACCCTCATGATCTCCCGG |
| | ACGGTGTCGTGGAACTCAGGCGCCC | SLSPGK | | [SEQ ID NO: 267] | ACCCCTGAGGTCACATGC |
| | TGACCAGCGGCGTGCACACCTTCCC | Without leader [SEQ ID | | QVQLVQSGAEVKKPGASV | GTGGTGGTGGACGTGAGC |
| | GGCTGTCCTACAGTCCTCAGGACTC | NO: 265]: | | KVSCKASGYTFTTYWITW | CACGAAGACCCTGAGGTC |
| | TACTCCCTCAGCAGCGTGGTGACCG | QVQLVQSGAEVKKPGASVKVSC | | VRQAPGQGLEWMGDIYPG | AAGTTCAACTGGTACGTG |
| | TGCCCTCCAGCAGCTTGGGCACCCA | KASGYTFTTYWITWVRQAPGQG | | SSISNYAQKFQGRVTMTR | GACGGCGTGGAGGTGCAT |
| | GACCTACATCTGCAACGTGAATCAC | LEWMGDIYPGSSISNYAQKFQG | | DTSTSTVYMELSSLRSED | AATGCCAAGACAAAGCCG |
| | AAGCCCAGCAACACCAAGGTGGACA | RVTMTRDTSTSTVYMELSSLRS | | TAVYYCAREDGYDAWFAY | CGGGAGGAGCAGTACAAC |
| | AGAAAGTTGAGCCCAAATCTTGTGA | EDTAVYYCAREDGYDAWFAYWG | | WGQGTLVTVSS | AGCACGTACCGTGTGGTC |
| | CAAAACTCACACATGCCCACCGTGC | QGTLVTVSSASTKGPSVFPLAP | | [SEQ ID NO: 268] | AGCGTCCTCACCGTCCTG |
| | CCAGCACCTGAACTCCTGGGGGGAC | SSKSTSGGTAALGCLVKDYFPE | | | CACCAGGACTGGCTGAAT |
| | CGTCAGTCTTCCTCTTCCCCCCAAA | PVTVSWNSGALTSGVHTFPAVL | | | GGCAAGGAGTACAAGTGC |
| | ACCCAAGGACACCCTCATGATCTCC | QSSGLYSLSSVVTVPSSSLGTQ | | | AAGGTCTCCAACAAAGCC |
| | CGGACCCCTGAGGTCACATGCGTGG | TYICNVNHKPSNTKVDKKVEPK | | | CTCCCAGCCCCCATCGAG |
| | TGGTGGACGTGAGCCACGAAGACCC | SCDKTHTCPPCPAPELLGGPSV | | | AAAACCATCTCCAAAGCC |
| | TGAGGTCAAGTTCAACTGGTACGTG | FLFPPKPKDTLMISRTPEVTCV | | | AAAGGGCAGCCCCGAGAA |
| | GACGGCGTGGAGGTGCATAATGCCA | VVDVSHEDPEVKFNWYVDGVEV | | | CCACAGGTGTACACCCTG |
| | AGACAAAGCCGCGGGAGGAGCAGTA | HNAKTKPREEQYNSTYRVVSVL | | | CCCCCATCCCGGGATGAG |
| | CAACAGCACGTACCGTGTGGTCAGC | TVLHQDWLNGKEYKCKVSNKAL | | | CTGACCAAGAACCAGGTC |
| | GTCCTCACCGTCCTGCACCAGGACT | PAPIEKTISKAKGQPREPQVYT | | | AGCCTGACCTGCCTGGTC |
| | GGCTGAATGGCAAGGAGTACAAGTG | LPPSRDELTKNQVSLTCLVKGF | | | AAAGGCTTCTATCCCAGC |
| | CAAGGTCTCCAACAAAGCCCTCCCA | YPSDIAVEWESNGQPENNYKTT | | | GACATCGCCGTGGAGTGG |
| | GCCCCCATCGAGAAAACCATCTCCA | PPVLDSDGSFFLYSKLTVDKSR | | | GAGAGCAATGGGCAGCCG |
| | AAGCCAAAGGGCAGCCCCGAGAACC | WQQGNVFSCSVMHEALHNHYTQ | | | GAGAACAACTACAAGACC |
| | ACAGGTGTACACCCTGCCCCCATCC | KSLSLSPGK | | | ACGCCTCCCGTGCTGGAC |
| | CGGGATGAGCTGACCAAGAACCAGG | | | | TCCGACGGCTCCTTCTTC |
| | TCAGCCTGACCTGCCTGGTCAAAGG | | | | TTATATTCAAAGCTCACC |
| | CTTCTATCCCAGCGACATCGCCGTG | | | | GTGGACAAGAGCAGGTGG |
| | GAGTGGGAGAGCAATGGGCAGCCGG | | | | CAGCAGGGGAACGTCTTC |
| | AGAACAACTACAAGACCACGCCTCC | | | | TCATGCTCCGTGATGCAT |
| | CGTGCTGGACTCCGACGGCTCCTTC | | | | GAGGCTCTGCACAACCAC |
| | TTCTTATATTCAAAGCTCACCGTGG | | | | TACACGCAGAAGAGCCTC |
| | ACAAGAGCAGGTGGCAGCAGGGGAA | | | | TCCCTGTCTCCCGGG |
| | CGTCTTCTCATGCTCCGTGATGCAT | | | | (Nucleotides 415 |
| | GAGGCTCTGCACAACCACTACACGC | | | | to 1401 of SEQ ID |
| | AGAAGAGCCTCTCCCTGTCTCCCGG | | | | NO: 262) |
| | GAAATGA | | | | [SEQ ID NO: 269] |
| | Without leader [SEQ ID | | | | ASTKGPSVFPLAPSSKST |
| | NO: 263]: | | | | SGGTAALGCLVKDYFPEP |
| | CAGGTGCAGCTGGTGCAGTCTGGCG | | | | VTVSWNSGALTSGVHTFP |
| | CCGAAGTGAAGAAACCTGGCGCCTC | | | | AVLQSSGLYSLSSVVTVP |
| | CGTGAAGGTGTCCTGCAAGGCTTCC | | | | SSSLGTQTYICNVNHKPS |
| | GGCTACACCTTTACCACCTACTGGA | | | | NTKVDKKVEPKSCDKTHT |
| | TCACCTGGGTGCGACAGGCTCCTGG | | | | CPPCPAPELLGGPSVFLF |
| | ACAGGGCCTGGAATGGATGGGCGAC | | | | PPKPKDTLMISRTPEVTC |
| | ATCTACCCCGGCTCCTCCATCTCCA | | | | VVVDVSHEDPEVKFNWYV |
| | ACTACGCCCAGAAGTTCCAGGGCCG | | | | DGVEVHNAKTKPREEQYN |
| | CGTGACCATGACCCGGGACACCTCC | | | | STYRVVSVLTVLHQDWLN |
| | ACCAGCACCGTGTACATGGAACTGT | | | | GKEYKCKVSNKALPAPIE |
| | CCTCCCTGCGGAGCGAGGACACCGC | | | | KTISKAKGQPREPQVYTL |
| | CGTGTACTACTGCGCTAGAGAGGAC | | | | PPSRDELTKNQVSLTCLV |
| | GGCTACGACGCTTGGTTTGCCTACT | | | | KGFYPSDIAVEWESNGQP |
| | GGGGCCAGGGCACCCTCGTGACCGT | | | | ENNYKTTPPVLDSDGSFF |
| | GTCATCTGCATCCACCAAGGGCCCA | | | | LYSKLTVDKSRWQQGNVF |
| | TCGGTCTTCCCCCTGGCACCCTCCT | | | | SCSVMHEALHNHYTQKSL |
| | CCAAGAGCACCTCTGGGGGCACAGC | | | | SLSPGK |
| | GGCCCTGGGCTGCCTGGTCAAGGAC | | | | [SEQ ID NO: 270] |
| | TACTTCCCCGAACCGGTGACGGTGT | | | | |
| | CGTGGAACTCAGGCGCCCTGACCAG | | | | |
| | CGGCGTGCACACCTTCCCGGCTGTC | | | | |
| | CTACAGTCCTCAGGACTCTACTCCC | | | | |
| | TCAGCAGCGTGGTGACCGTGCCCTC | | | | |
| | CAGCAGCTTGGGCACCCAGACCTAC | | | | |
| | ATCTGCAACGTGAATCACAAGCCCA | | | | |
| | GCAACACCAAGGTGGACAAGAAAGT | | | | |
| | TGAGCCCAAATCTTGTGACAAAACT | | | | |
| | CACACATGCCCACCGTGCCCAGCAC | | | | |
| | CTGAACTCCTGGGGGGACCGTCAGT | | | | |
| | CTTCCTCTTCCCCCCAAAACCCAAG | | | | |
| | GACACCCTCATGATCTCCCGGACCC | | | | |
| | CTGAGGTCACATGCGTGGTGGTGGA | | | | |
| | CGTGAGCCACGAAGACCCTGAGGTC | | | | |
| | AAGTTCAACTGGTACGTGGACGGCG | | | | |
| | TGGAGGTGCATAATGCCAAGACAAA | | | | |
| | GCCGCGGGAGGAGCAGTACAACAGC | | | | |
| | ACGTACCGTGTGGTCAGCGTCCTCA | | | | |
| | CCGTCCTGCACCAGGACTGGCTGAA | | | | |
| | TGGCAAGGAGTACAAGTGCAAGGTC | | | | |
| | TCCAACAAAGCCCTCCCAGCCCCCA | | | | |
| | TCGAGAAAACCATCTCCAAAGCCAA | | | | |
| | AGGGCAGCCCCGAGAACCACAGGTG | | | | |
| | TACACCCTGCCCCCATCCCGGGATG | | | | |
| | AGCTGACCAAGAACCAGGTCAGCCT | | | | |
| | GACCTGCCTGGTCAAAGGCTTCTAT | | | | |
| | CCCAGCGACATCGCCGTGGAGTGGG | | | | |
| | AGAGCAATGGGCAGCCGGAGAACAA | | | | |
| | CTACAAGACCACGCCTCCCGTGCTG | | | | |
| | GACTCCGACGGCTCCTTCTTCTTAT | | | | |
| | ATTCAAAGCTCACCGTGGACAAGAG | | | | |
| | CAGGTGGCAGCAGGGGAACGTCTTC | | | | |
| | TCATGCTCCGTGATGCATGAGGCTC | | | | |
| | TGCACAACCACTACACGCAGAAGAG | | | | |
| | CCTCTCCCTGTCTCCCGGGAAATGA | | | | |
| 7G6- | With leader [SEQ ID NO: | With leader [SEQ ID | ATGGGCTG | CAGGTGCAGCTGGTGCAG | GCATCCACCAAGGGCCCA |
| HCzu9 | 271]: | NO: 273]: | GTCCTGCA | TCTGGCGCCGAAGTGAAG | TCGGTCTTCCCCCTGGCA |
| | ATGGGCTGGTCCTGCATCATCCTGT | MGWSCIILFLVATATGVHSQVQ | TCATCCTG | AAACCTGGCGCCTCCGTG | CCCTCCTCCAAGAGCACC |
| | TTCTGGTGGCCACCGCCACCGGCGT | LVQSGAEVKKPGASVKVSCKAS | TTTCTGGT | AAGGTGTCCTGCAAGGCT | TCTGGGGGCACAGCGGCC |
| | GCACAGCCAGGTGCAGCTGGTGCAG | GYTFTTYWITWVRQAPGQGLEW | GGCCACCG | TCCGGCTACACCTTTACC | CTGGGCTGCCTGGTCAAG |
| | TCTGGCGCCGAAGTGAAGAAACCTG | MGDIYPGSSICNYAQKFQGRVT | CCACCGGC | ACCTACTGGATCACCTGG | GACTACTTCCCCGAACCG |
| | GCGCCTCCGTGAAGGTGTCCTGCAA | MTVDTSTSTVYMELSSLRSEDT | GTGCACAG | GTGCGACAGGCTCCTGGA | GTGACGGTGTCGTGGAAC |
| | GGCTTCCGGCTACACCTTTACCACC | AVYYCAREDGYDAWFAYWGQGT | C | CAGGGCCTGGAATGGATG | TCAGGCGCCCTGACCAGC |
| | TACTGGATCACCTGGGTGCGACAGG | LVTVSSASTKGPSVFPLAPSSK | (Nucleo- | GGCGACATCTACCCCGGC | GGCGTGCACACCTTCCCG |
| | CTCCTGGACAGGGCCTGGAATGGAT | STSGGTAALGCLVKDYFPEPVT | tides 1 | TCCTCCATCTGCAACTAC | GCTGTCCTACAGTCCTCA |
| | GGGCGACATCTACCCCGGCTCCTCC | VSWNSGALTSGVHTFPAVLQSS | to 57 of | GCCCAGAAGTTCCAGGGC | GGACTCTACTCCCTCAGC |
| | ATCTGCAACTACGCCCAGAAGTTCC | GLYSLSSVVTVPSSSLGTQTYI | SEQ ID | CGCGTGACCATGACCGTG | AGCGTGGTGACCGTGCCC |
| | AGGGCCGCGTGACCATGACCGTGGA | CNVNHKPSNTKVDKKVEPKSCD | NO: 271) | GACACCTCCACCAGCACC | TCCAGCAGCTTGGGCACC |
| | CACCTCCACCAGCACCGTGTACATG | KTHTCPPCPAPELLGGPSVFLF | [SEQ ID | GTGTACATGGAACTGTCC | CAGACCTACATCTGCAAC |
| | GAACTGTCCTCCCTGCGGAGCGAGG | PPKPKDTLMISRTPEVTCVVVD | NO: 275] | TCCCTGCGGAGCGAGGAC | GTGAATCACAAGCCCAGC |
| | ACACCGCCGTGTACTACTGCGCTAG | VSHEDPEVKFNWYVDGVEVHNA | | ACCGCCGTGTACTACTGC | AACACCAAGGTGGACAAG |
| | AGAGGACGGCTACGACGCTTGGTTT | KTKPREEQYNSTYRVVSVLTVL | | GCTAGAGAGGACGGCTAC | AAAGTTGAGCCCAAATCT |
| | GCCTACTGGGGCCAGGGCACCCTCG | HQDWLNGKEYKCKVSNKALPAP | | GACGCTTGGTTTGCCTAC | TGTGACAAAACTCACACA |
| | TGACCGTGTCATCTGCATCCACCAA | IEKTISKAKGQPREPQVYTLPP | | TGGGGCCAGGGCACCCTC | TGCCCACCGTGCCCAGCA |
| | GGGCCCATCGGTCTTCCCCCTGGCA | SRDELTKNQVSLTCLVKGFYPS | | GTGACCGTGTCATCT | CCTGAACTCCTGGGGGGA |
| | CCCTCCTCCAAGAGCACCTCTGGGG | DIAVEWESNGQPENNYKTTPPV | | (Nucleotides 58 to | CCGTCAGTCTTCCTCTTC |
| | GCACAGCGGCCCTGGGCTGCCTGGT | LDSDGSFFLYSKLTVDKSRWQQ | | 414 of SEQ ID NO: | CCCCCAAAACCCAAGGAC |
| | CAAGGACTACTTCCCCGAACCGGTG | GNVFSCSVMHEALHNHYTQKSL | | 271) | ACCCTCATGATCTCCCGG |
| | ACGGTGTCGTGGAACTCAGGCGCCC | SLSPGK | | [SEQ ID NO: 276] | ACCCCTGAGGTCACATGC |
| | TGACCAGCGGCGTGCACACCTTCCC | Without leader [SEQ ID | | QVQLVQSGAEVKKPGASV | GTGGTGGTGGACGTGAGC |
| | GGCTGTCCTACAGTCCTCAGGACTC | NO: 274]: | | KVSCKASGYTFTTYWITW | CACGAAGACCCTGAGGTC |
| | TACTCCCTCAGCAGCGTGGTGACCG | QVQLVQSGAEVKKPGASVKVSC | | VRQAPGQGLEWMGDIYPG | AAGTTCAACTGGTACGTG |
| | TGCCCTCCAGCAGCTTGGGCACCCA | KASGYTFTTYWITWVRQAPGQG | | SSICNYAQKFQGRVTMTV | GACGGCGTGGAGGTGCAT |
| | GACCTACATCTGCAACGTGAATCAC | LEWMGDIYPGSSICNYAQKFQG | | DTSTSTVYMELSSLRSED | AATGCCAAGACAAAGCCG |
| | AAGCCCAGCAACACCAAGGTGGACA | RVTMTVDTSTSTVYMELSSLRS | | TAVYYCAREDGYDAWFAY | CGGGAGGAGCAGTACAAC |
| | AGAAAGTTGAGCCCAAATCTTGTGA | EDTAVYYCAREDGYDAWFAYWG | | WGQGTLVTVSS | AGCACGTACCGTGTGGTC |
| | CAAAACTCACACATGCCCACCGTGC | QGTLVTVSSASTKGPSVFPLAP | | [SEQ ID NO: 277] | AGCGTCCTCACCGTCCTG |
| | CCAGCACCTGAACTCCTGGGGGGAC | SSKSTSGGTAALGCLVKDYFPE | | | CACCAGGACTGGCTGAAT |
| | CGTCAGTCTTCCTCTTCCCCCCAAA | PVTVSWNSGALTSGVHTFPAVL | | | GGCAAGGAGTACAAGTGC |
| | ACCCAAGGACACCCTCATGATCTCC | QSSGLYSLSSVVTVPSSSLGTQ | | | AAGGTCTCCAACAAAGCC |
| | CGGACCCCTGAGGTCACATGCGTGG | TYICNVNHKPSNTKVDKKVEPK | | | CTCCCAGCCCCCATCGAG |
| | TGGTGGACGTGAGCCACGAAGACCC | SCDKTHTCPPCPAPELLGGPSV | | | AAAACCATCTCCAAAGCC |
| | TGAGGTCAAGTTCAACTGGTACGTG | FLFPPKPKDTLMISRTPEVTCV | | | AAAGGGCAGCCCCGAGAA |
| | GACGGCGTGGAGGTGCATAATGCCA | VVDVSHEDPEVKFNWYVDGVEV | | | CCACAGGTGTACACCCTG |
| | AGACAAAGCCGCGGGAGGAGCAGTA | HNAKTKPREEQYNSTYRVVSVL | | | CCCCCATCCCGGGATGAG |
| | CAACAGCACGTACCGTGTGGTCAGC | TVLHQDWLNGKEYKCKVSNKAL | | | CTGACCAAGAACCAGGTC |
| | GTCCTCACCGTCCTGCACCAGGACT | PAPIEKTISKAKGQPREPQVYT | | | AGCCTGACCTGCCTGGTC |
| | GGCTGAATGGCAAGGAGTACAAGTG | LPPSRDELTKNQVSLTCLVKGF | | | AAAGGCTTCTATCCCAGC |
| | CAAGGTCTCCAACAAAGCCCTCCCA | YPSDIAVEWESNGQPENNYKTT | | | GACATCGCCGTGGAGTGG |
| | GCCCCCATCGAGAAAACCATCTCCA | PPVLDSDGSFFLYSKLTVDKSR | | | GAGAGCAATGGGCAGCCG |
| | AAGCCAAAGGGCAGCCCCGAGAACC | WQQGNVFSCSVMHEALHNHYTQ | | | GAGAACAACTACAAGACC |
| | ACAGGTGTACACCCTGCCCCCATCC | KSLSLSPGK | | | ACGCCTCCCGTGCTGGAC |
| | CGGGATGAGCTGACCAAGAACCAGG | | | | TCCGACGGCTCCTTCTTC |
| | TCAGCCTGACCTGCCTGGTCAAAGG | | | | TTATATTCAAAGCTCACC |
| | CTTCTATCCCAGCGACATCGCCGTG | | | | GTGGACAAGAGCAGGTGG |
| | GAGTGGGAGAGCAATGGGCAGCCGG | | | | CAGCAGGGGAACGTCTTC |
| | AGAACAACTACAAGACCACGCCTCC | | | | TCATGCTCCGTGATGCAT |
| | CGTGCTGGACTCCGACGGCTCCTTC | | | | GAGGCTCTGCACAACCAC |
| | TTCTTATATTCAAAGCTCACCGTGG | | | | TACACGCAGAAGAGCCTC |
| | ACAAGAGCAGGTGGCAGCAGGGGAA | | | | TCCCTGTCTCCCGGG |
| | CGTCTTCTCATGCTCCGTGATGCAT | | | | (Nucleotides 415 |
| | GAGGCTCTGCACAACCACTACACGC | | | | to 1401 of SEQ ID |
| | AGAAGAGCCTCTCCCTGTCTCCCGG | | | | NO: 271) |
| | GAAATGA | | | | [SEQ ID NO: 278] |
| | Without leader [SEQ ID | | | | ASTKGPSVFPLAPSSKST |
| | NO: 272]: | | | | SGGTAALGCLVKDYFPEP |
| | CAGGTGCAGCTGGTGCAGTCTGGCG | | | | VTVSWNSGALTSGVHTFP |
| | CCGAAGTGAAGAAACCTGGCGCCTC | | | | AVLQSSGLYSLSSVVTVP |
| | CGTGAAGGTGTCCTGCAAGGCTTCC | | | | SSSLGTQTYICNVNHKPS |
| | GGCTACACCTTTACCACCTACTGGA | | | | NTKVDKKVEPKSCDKTHT |
| | TCACCTGGGTGCGACAGGCTCCTGG | | | | CPPCPAPELLGGPSVFLF |
| | ACAGGGCCTGGAATGGATGGGCGAC | | | | PPKPKDTLMISRTPEVTC |
| | ATCTACCCCGGCTCCTCCATCTGCA | | | | VVVDVSHEDPEVKFNWYV |
| | ACTACGCCCAGAAGTTCCAGGGCCG | | | | DGVEVHNAKTKPREEQYN |
| | CGTGACCATGACCGTGGACACCTCC | | | | STYRVVSVLTVLHQDWLN |
| | ACCAGCACCGTGTACATGGAACTGT | | | | GKEYKCKVSNKALPAPIE |
| | CCTCCCTGCGGAGCGAGGACACCGC | | | | KTISKAKGQPREPQVYTL |
| | CGTGTACTACTGCGCTAGAGAGGAC | | | | PPSRDELTKNQVSLTCLV |
| | GGCTACGACGCTTGGTTTGCCTACT | | | | KGFYPSDIAVEWESNGQP |
| | GGGGCCAGGGCACCCTCGTGACCGT | | | | ENNYKTTPPVLDSDGSFF |
| | GTCATCTGCATCCACCAAGGGCCCA | | | | LYSKLTVDKSRWQQGNVF |
| | TCGGTCTTCCCCCTGGCACCCTCCT | | | | SCSVMHEALHNHYTQKSL |
| | CCAAGAGCACCTCTGGGGGCACAGC | | | | SLSPGK |
| | GGCCCTGGGCTGCCTGGTCAAGGAC | | | | [SEQ ID NO: 279] |
| | TACTTCCCCGAACCGGTGACGGTGT | | | | |
| | CGTGGAACTCAGGCGCCCTGACCAG | | | | |
| | CGGCGTGCACACCTTCCCGGCTGTC | | | | |
| | CTACAGTCCTCAGGACTCTACTCCC | | | | |
| | TCAGCAGCGTGGTGACCGTGCCCTC | | | | |
| | CAGCAGCTTGGGCACCCAGACCTAC | | | | |
| | ATCTGCAACGTGAATCACAAGCCCA | | | | |
| | GCAACACCAAGGTGGACAAGAAAGT | | | | |
| | TGAGCCCAAATCTTGTGACAAAACT | | | | |
| | CACACATGCCCACCGTGCCCAGCAC | | | | |
| | CTGAACTCCTGGGGGGACCGTCAGT | | | | |
| | CTTCCTCTTCCCCCCAAAACCCAAG | | | | |
| | GACACCCTCATGATCTCCCGGACCC | | | | |
| | CTGAGGTCACATGCGTGGTGGTGGA | | | | |
| | CGTGAGCCACGAAGACCCTGAGGTC | | | | |
| | AAGTTCAACTGGTACGTGGACGGCG | | | | |
| | TGGAGGTGCATAATGCCAAGACAAA | | | | |
| | GCCGCGGGAGGAGCAGTACAACAGC | | | | |
| | ACGTACCGTGTGGTCAGCGTCCTCA | | | | |
| | CCGTCCTGCACCAGGACTGGCTGAA | | | | |
| | TGGCAAGGAGTACAAGTGCAAGGTC | | | | |
| | TCCAACAAAGCCCTCCCAGCCCCCA | | | | |
| | TCGAGAAAACCATCTCCAAAGCCAA | | | | |
| | AGGGCAGCCCCGAGAACCACAGGTG | | | | |
| | TACACCCTGCCCCCATCCCGGGATG | | | | |
| | AGCTGACCAAGAACCAGGTCAGCCT | | | | |
| | GACCTGCCTGGTCAAAGGCTTCTAT | | | | |
| | CCCAGCGACATCGCCGTGGAGTGGG | | | | |
| | AGAGCAATGGGCAGCCGGAGAACAA | | | | |
| | CTACAAGACCACGCCTCCCGTGCTG | | | | |
| | GACTCCGACGGCTCCTTCTTCTTAT | | | | |
| | ATTCAAAGCTCACCGTGGACAAGAG | | | | |
| | CAGGTGGCAGCAGGGGAACGTCTTC | | | | |
| | TCATGCTCCGTGATGCATGAGGCTC | | | | |
| | TGCACAACCACTACACGCAGAAGAG | | | | |
| | CCTCTCCCTGTCTCCCGGGAAATGA | | | | |
| 7G6- | With leader [SEQ ID NO: | With leader [SEQ ID | ATGGGCTG | CAGGTGCAGCTGGTGCAG | GCATCCACCAAGGGCCCA |
| HCzu10 | 280]: | NO: 282]: | GTCCTGCA | TCTGGCGCCGAAGTGAAG | TCGGTCTTCCCCCTGGCA |
| | ATGGGCTGGTCCTGCATCATCCTGT | MGWSCIILFLVATATGVHSQVQ | TCATCCTG | AAACCTGGCGCCTCCGTG | CCCTCCTCCAAGAGCACC |
| | TTCTGGTGGCCACCGCCACCGGCGT | LVQSGAEVKKPGASVKVSCKAS | TTTCTGGT | AAGGTGTCCTGCAAGGCT | TCTGGGGGCACAGCGGCC |
| | GCACAGCCAGGTGCAGCTGGTGCAG | GYTFTTYWITWVRQAPGQGLEW | GGCCACCG | TCCGGCTACACCTTTACC | CTGGGCTGCCTGGTCAAG |
| | TCTGGCGCCGAAGTGAAGAAACCTG | MGDIYPGSSICNYAQKFQGRVT | CCACCGGC | ACCTACTGGATCACCTGG | GACTACTTCCCCGAACCG |
| | GCGCCTCCGTGAAGGTGTCCTGCAA | MTRDTSTSTVYMELSSLRSEDT | GTGCACAG | GTGCGACAGGCTCCTGGA | GTGACGGTGTCGTGGAAC |
| | GGCTTCCGGCTACACCTTTACCACC | AVYYCAREDGYDAWFAYWGQGT | C | CAGGGCCTGGAATGGATG | TCAGGCGCCCTGACCAGC |
| | TACTGGATCACCTGGGTGCGACAGG | LVTVSSASTKGPSVFPLAPSSK | (Nucleo- | GGCGACATCTACCCCGGC | GGCGTGCACACCTTCCCG |
| | CTCCTGGACAGGGCCTGGAATGGAT | STSGGTAALGCLVKDYFPEPVT | tides 1 | TCCTCCATCTGCAACTAC | GCTGTCCTACAGTCCTCA |
| | GGGCGACATCTACCCCGGCTCCTCC | VSWNSGALTSGVHTFPAVLQSS | to 57 of | GCCCAGAAGTTCCAGGGC | GGACTCTACTCCCTCAGC |
| | ATCTGCAACTACGCCCAGAAGTTCC | GLYSLSSVVTVPSSSLGTQTYI | SEQ ID | CGCGTGACCATGACCCGG | AGCGTGGTGACCGTGCCC |
| | AGGGCCGCGTGACCATGACCCGGGA | CNVNHKPSNTKVDKKVEPKSCD | NO: 280) | GACACCTCCACCAGCACC | TCCAGCAGCTTGGGCACC |
| | CACCTCCACCAGCACCGTGTACATG | KTHTCPPCPAPELLGGPSVFLF | [SEQ ID | GTGTACATGGAACTGTCC | CAGACCTACATCTGCAAC |
| | GAACTGTCCTCCCTGCGGAGCGAGG | PPKPKDTLMISRTPEVTCVVVD | NO: 284] | TCCCTGCGGAGCGAGGAC | GTGAATCACAAGCCCAGC |
| | ACACCGCCGTGTACTACTGCGCTAG | VSHEDPEVKFNWYVDGVEVHNA | | ACCGCCGTGTACTACTGC | AACACCAAGGTGGACAAG |
| | AGAGGACGGCTACGACGCTTGGTTT | KTKPREEQYNSTYRVVSVLTVL | | GCTAGAGAGGACGGCTAC | AAAGTTGAGCCCAAATCT |
| | GCCTACTGGGGCCAGGGCACCCTCG | HQDWLNGKEYKCKVSNKALPAP | | GACGCTTGGTTTGCCTAC | TGTGACAAAACTCACACA |
| | TGACCGTGTCATCTGCATCCACCAA | IEKTISKAKGQPREPQVYTLPP | | TGGGGCCAGGGCACCCTC | TGCCCACCGTGCCCAGCA |
| | GGGCCCATCGGTCTTCCCCCTGGCA | SRDELTKNQVSLTCLVKGFYPS | | GTGACCGTGTCATCT | CCTGAACTCCTGGGGGGA |
| | CCCTCCTCCAAGAGCACCTCTGGGG | DIAVEWESNGQPENNYKTTPPV | | (Nucleotides 58 to | CCGTCAGTCTTCCTCTTC |
| | GCACAGCGGCCCTGGGCTGCCTGGT | LDSDGSFFLYSKLTVDKSRWQQ | | 414 of SEQ ID NO: | CCCCCAAAACCCAAGGAC |
| | CAAGGACTACTTCCCCGAACCGGTG | GNVFSCSVMHEALHNHYTQKSL | | 280) | ACCCTCATGATCTCCCGG |
| | ACGGTGTCGTGGAACTCAGGCGCCC | SLSPGK | | [SEQ ID NO: 285] | ACCCCTGAGGTCACATGC |
| | TGACCAGCGGCGTGCACACCTTCCC | Without leader [SEQ ID | | QVQLVQSGAEVKKPGASV | GTGGTGGTGGACGTGAGC |
| | GGCTGTCCTACAGTCCTCAGGACTC | NO: 283]: | | KVSCKASGYTFTTYWITW | CACGAAGACCCTGAGGTC |
| | TACTCCCTCAGCAGCGTGGTGACCG | QVQLVQSGAEVKKPGASVKVSC | | VRQAPGQGLEWMGDIYPG | AAGTTCAACTGGTACGTG |
| | TGCCCTCCAGCAGCTTGGGCACCCA | KASGYTFTTYWITWVRQAPGQG | | SSICNYAQKFQGRVTMTR | GACGGCGTGGAGGTGCAT |
| | GACCTACATCTGCAACGTGAATCAC | LEWMGDIYPGSSICNYAQKFQG | | DTSTSTVYMELSSLRSED | AATGCCAAGACAAAGCCG |
| | AAGCCCAGCAACACCAAGGTGGACA | RVTMTRDTSTSTVYMELSSLRS | | TAVYYCAREDGYDAWFAY | CGGGAGGAGCAGTACAAC |
| | AGAAAGTTGAGCCCAAATCTTGTGA | EDTAVYYCAREDGYDAWFAYWG | | WGQGTLVTVSS | AGCACGTACCGTGTGGTC |
| | CAAAACTCACACATGCCCACCGTGC | QGTLVTVSSASTKGPSVFPLAP | | [SEQ ID NO: 286] | AGCGTCCTCACCGTCCTG |
| | CCAGCACCTGAACTCCTGGGGGGAC | SSKSTSGGTAALGCLVKDYFPE | | | CACCAGGACTGGCTGAAT |
| | CGTCAGTCTTCCTCTTCCCCCCAAA | PVTVSWNSGALTSGVHTFPAVL | | | GGCAAGGAGTACAAGTGC |
| | ACCCAAGGACACCCTCATGATCTCC | QSSGLYSLSSVVTVPSSSLGTQ | | | AAGGTCTCCAACAAAGCC |
| | CGGACCCCTGAGGTCACATGCGTGG | TYICNVNHKPSNTKVDKKVEPK | | | CTCCCAGCCCCCATCGAG |
| | TGGTGGACGTGAGCCACGAAGACCC | SCDKTHTCPPCPAPELLGGPSV | | | AAAACCATCTCCAAAGCC |
| | TGAGGTCAAGTTCAACTGGTACGTG | FLFPPKPKDTLMISRTPEVTCV | | | AAAGGGCAGCCCCGAGAA |
| | GACGGCGTGGAGGTGCATAATGCCA | VVDVSHEDPEVKFNWYVDGVEV | | | CCACAGGTGTACACCCTG |
| | AGACAAAGCCGCGGGAGGAGCAGTA | HNAKTKPREEQYNSTYRVVSVL | | | CCCCCATCCCGGGATGAG |
| | CAACAGCACGTACCGTGTGGTCAGC | TVLHQDWLNGKEYKCKVSNKAL | | | CTGACCAAGAACCAGGTC |
| | GTCCTCACCGTCCTGCACCAGGACT | PAPIEKTISKAKGQPREPQVYT | | | AGCCTGACCTGCCTGGTC |
| | GGCTGAATGGCAAGGAGTACAAGTG | LPPSRDELTKNQVSLTCLVKGF | | | AAAGGCTTCTATCCCAGC |
| | CAAGGTCTCCAACAAAGCCCTCCCA | YPSDIAVEWESNGQPENNYKTT | | | GACATCGCCGTGGAGTGG |
| | GCCCCCATCGAGAAAACCATCTCCA | PPVLDSDGSFFLYSKLTVDKSR | | | GAGAGCAATGGGCAGCCG |
| | AAGCCAAAGGGCAGCCCCGAGAACC | WQQGNVFSCSVMHEALHNHYTQ | | | GAGAACAACTACAAGACC |
| | ACAGGTGTACACCCTGCCCCCATCC | KSLSLSPGK | | | ACGCCTCCCGTGCTGGAC |
| | CGGGATGAGCTGACCAAGAACCAGG | | | | TCCGACGGCTCCTTCTTC |
| | TCAGCCTGACCTGCCTGGTCAAAGG | | | | TTATATTCAAAGCTCACC |
| | CTTCTATCCCAGCGACATCGCCGTG | | | | GTGGACAAGAGCAGGTGG |
| | GAGTGGGAGAGCAATGGGCAGCCGG | | | | CAGCAGGGGAACGTCTTC |
| | AGAACAACTACAAGACCACGCCTCC | | | | TCATGCTCCGTGATGCAT |
| | CGTGCTGGACTCCGACGGCTCCTTC | | | | GAGGCTCTGCACAACCAC |
| | TTCTTATATTCAAAGCTCACCGTGG | | | | TACACGCAGAAGAGCCTC |
| | ACAAGAGCAGGTGGCAGCAGGGGAA | | | | TCCCTGTCTCCCGGG |
| | CGTCTTCTCATGCTCCGTGATGCAT | | | | (Nucleotides 415 |
| | GAGGCTCTGCACAACCACTACACGC | | | | to 1401 of SEQ ID |
| | AGAAGAGCCTCTCCCTGTCTCCCGG | | | | NO: 280) |
| | GAAATGA | | | | [SEQ ID NO: 287] |
| | Without leader [SEQ ID | | | | ASTKGPSVFPLAPSSKST |
| | NO: 281]: | | | | SGGTAALGCLVKDYFPEP |
| | CAGGTGCAGCTGGTGCAGTCTGGCG | | | | VTVSWNSGALTSGVHTFP |
| | CCGAAGTGAAGAAACCTGGCGCCTC | | | | AVLQSSGLYSLSSVVTVP |
| | CGTGAAGGTGTCCTGCAAGGCTTCC | | | | SSSLGTQTYICNVNHKPS |
| | GGCTACACCTTTACCACCTACTGGA | | | | NTKVDKKVEPKSCDKTHT |
| | TCACCTGGGTGCGACAGGCTCCTGG | | | | CPPCPAPELLGGPSVFLF |
| | ACAGGGCCTGGAATGGATGGGCGAC | | | | PPKPKDTLMISRTPEVTC |
| | ATCTACCCCGGCTCCTCCATCTGCA | | | | VVVDVSHEDPEVKFNWYV |
| | ACTACGCCCAGAAGTTCCAGGGCCG | | | | DGVEVHNAKTKPREEQYN |
| | CGTGACCATGACCCGGGACACCTCC | | | | STYRVVSVLTVLHQDWLN |
| | ACCAGCACCGTGTACATGGAACTGT | | | | GKEYKCKVSNKALPAPIE |
| | CCTCCCTGCGGAGCGAGGACACCGC | | | | KTISKAKGQPREPQVYTL |
| | CGTGTACTACTGCGCTAGAGAGGAC | | | | PPSRDELTKNQVSLTCLV |
| | GGCTACGACGCTTGGTTTGCCTACT | | | | KGFYPSDIAVEWESNGQP |
| | GGGGCCAGGGCACCCTCGTGACCGT | | | | ENNYKTTPPVLDSDGSFF |
| | GTCATCTGCATCCACCAAGGGCCCA | | | | LYSKLTVDKSRWQQGNVF |
| | TCGGTCTTCCCCCTGGCACCCTCCT | | | | SCSVMHEALHNHYTQKSL |
| | CCAAGAGCACCTCTGGGGGCACAGC | | | | SLSPGK |
| | GGCCCTGGGCTGCCTGGTCAAGGAC | | | | [SEQ ID NO: 288] |
| | TACTTCCCCGAACCGGTGACGGTGT | | | | |
| | CGTGGAACTCAGGCGCCCTGACCAG | | | | |
| | CGGCGTGCACACCTTCCCGGCTGTC | | | | |
| | CTACAGTCCTCAGGACTCTACTCCC | | | | |
| | TCAGCAGCGTGGTGACCGTGCCCTC | | | | |
| | CAGCAGCTTGGGCACCCAGACCTAC | | | | |
| | ATCTGCAACGTGAATCACAAGCCCA | | | | |
| | GCAACACCAAGGTGGACAAGAAAGT | | | | |
| | TGAGCCCAAATCTTGTGACAAAACT | | | | |
| | CACACATGCCCACCGTGCCCAGCAC | | | | |
| | CTGAACTCCTGGGGGGACCGTCAGT | | | | |
| | CTTCCTCTTCCCCCCAAAACCCAAG | | | | |
| | GACACCCTCATGATCTCCCGGACCC | | | | |
| | CTGAGGTCACATGCGTGGTGGTGGA | | | | |
| | CGTGAGCCACGAAGACCCTGAGGTC | | | | |
| | AAGTTCAACTGGTACGTGGACGGCG | | | | |
| | TGGAGGTGCATAATGCCAAGACAAA | | | | |
| | GCCGCGGGAGGAGCAGTACAACAGC | | | | |
| | ACGTACCGTGTGGTCAGCGTCCTCA | | | | |
| | CCGTCCTGCACCAGGACTGGCTGAA | | | | |
| | TGGCAAGGAGTACAAGTGCAAGGTC | | | | |
| | TCCAACAAAGCCCTCCCAGCCCCCA | | | | |
| | TCGAGAAAACCATCTCCAAAGCCAA | | | | |
| | AGGGCAGCCCCGAGAACCACAGGTG | | | | |
| | TACACCCTGCCCCCATCCCGGGATG | | | | |
| | AGCTGACCAAGAACCAGGTCAGCCT | | | | |
| | GACCTGCCTGGTCAAAGGCTTCTAT | | | | |
| | CCCAGCGACATCGCCGTGGAGTGGG | | | | |
| | AGAGCAATGGGCAGCCGGAGAACAA | | | | |
| | CTACAAGACCACGCCTCCCGTGCTG | | | | |
| | GACTCCGACGGCTCCTTCTTCTTAT | | | | |
| | ATTCAAAGCTCACCGTGGACAAGAG | | | | |
| | CAGGTGGCAGCAGGGGAACGTCTTC | | | | |
| | TCATGCTCCGTGATGCATGAGGCTC | | | | |
| | TGCACAACCACTACACGCAGAAGAG | | | | |
| | CCTCTCCCTGTCTCCCGGGAAATGA | | | | |
| 7G6- | With leader [SEQ ID NO: | With leader [SEQ ID | ATGGGCTG | GAAGTGCAGCTGCTGGAA | GCATCCACCAAGGGCCCA |
| HCzu11 | 289]: | NO: 291]: | GTCCTGCA | TCTGGCGGCGGACTGGTG | TCGGTCTTCCCCCTGGCA |
| | ATGGGCTGGTCCTGCATCATCCTGT | MGWSCIILFLVATATGVHSEVQ | TCATCCTG | CAGCCTGGCGGCTCTCTG | CCCTCCTCCAAGAGCACC |
| | TTCTGGTGGCCACCGCCACCGGCGT | LLESGGGLVQPGGSLRLSCAAS | TTTCTGGT | AGACTGTCTTGTGCCGCC | TCTGGGGGCACAGCGGCC |
| | GCACAGCGAAGTGCAGCTGCTGGAA | GYTFTTYWITWVRQAPGKGLEW | GGCCACCG | TCCGGCTACACCTTCACC | CTGGGCTGCCTGGTCAAG |
| | TCTGGCGGCGGACTGGTGCAGCCTG | VSDIYPGSSICNYNEKFKSRFT | CCACCGGC | ACCTACTGGATCACCTGG | GACTACTTCCCCGAACCG |
| | GCGGCTCTCTGAGACTGTCTTGTGC | ISRDNSKNTLYLQMNSLRAEDT | GTGCACAG | GTCCGACAGGCTCCCGGC | GTGACGGTGTCGTGGAAC |
| | CGCCTCCGGCTACACCTTCACCACC | AVYYCAKEDGYDAWFAYWGQGT | C | AAGGGACTGGAATGGGTG | TCAGGCGCCCTGACCAGC |
| | TACTGGATCACCTGGGTCCGACAGG | LVTVSSASTKGPSVFPLAPSSK | (Nucleo- | TCCGACATCTACCCCGGC | GGCGTGCACACCTTCCCG |
| | CTCCCGGCAAGGGACTGGAATGGGT | STSGGTAALGCLVKDYFPEPVT | tides 1 | TCCTCCATCTGCAACTAC | GCTGTCCTACAGTCCTCA |
| | GTCCGACATCTACCCCGGCTCCTCC | VSWNSGALTSGVHTFPAVLQSS | to 57 of | AACGAGAAGTTCAAGTCC | GGACTCTACTCCCTCAGC |
| | ATCTGCAACTACAACGAGAAGTTCA | GLYSLSSVVTVPSSSLGTQTYI | SEQ ID | CGGTTCACCATCTCCCGG | AGCGTGGTGACCGTGCCC |
| | AGTCCCGGTTCACCATCTCCCGGGA | CNVNHKPSNTKVDKKVEPKSCD | NO: 289) | GACAACTCCAAGAACACC | TCCAGCAGCTTGGGCACC |
| | CAACTCCAAGAACACCCTGTACCTC | KTHTCPPCPAPELLGGPSVFLF | [SEQ ID | CTGTACCTCCAGATGAAC | CAGACCTACATCTGCAAC |
| | CAGATGAACTCCCTGCGGGCCGAGG | PPKPKDTLMISRTPEVTCVVVD | NO: 293] | TCCCTGCGGGCCGAGGAC | GTGAATCACAAGCCCAGC |
| | ACACCGCCGTGTACTACTGTGCCAA | VSHEDPEVKFNWYVDGVEVHNA | | ACCGCCGTGTACTACTGT | AACACCAAGGTGGACAAG |
| | AGAGGACGGCTACGACGCTTGGTTT | KTKPREEQYNSTYRVVSVLTVL | | GCCAAAGAGGACGGCTAC | AAAGTTGAGCCCAAATCT |
| | GCCTACTGGGGCCAGGGCACCCTGG | HQDWLNGKEYKCKVSNKALPAP | | GACGCTTGGTTTGCCTAC | TGTGACAAAACTCACACA |
| | TCACCGTGTCATCTGCATCCACCAA | IEKTISKAKGQPREPQVYTLPP | | TGGGGCCAGGGCACCCTG | TGCCCACCGTGCCCAGCA |
| | GGGCCCATCGGTCTTCCCCCTGGCA | SRDELTKNQVSLTCLVKGFYPS | | GTCACCGTGTCATCT | CCTGAACTCCTGGGGGGA |
| | CCCTCCTCCAAGAGCACCTCTGGGG | DIAVEWESNGQPENNYKTTPPV | | (Nucleotides 58 to | CCGTCAGTCTTCCTCTTC |
| | GCACAGCGGCCCTGGGCTGCCTGGT | LDSDGSFFLYSKLTVDKSRWQQ | | 414 of SEQ ID NO: | CCCCCAAAACCCAAGGAC |
| | CAAGGACTACTTCCCCGAACCGGTG | GNVFSCSVMHEALHNHYTQKSL | | 289) | ACCCTCATGATCTCCCGG |
| | ACGGTGTCGTGGAACTCAGGCGCCC | SLSPGK | | [SEQ ID NO: 294] | ACCCCTGAGGTCACATGC |
| | TGACCAGCGGCGTGCACACCTTCCC | Without leader [SEQ ID | | EVQLLESGGGLVQPGGSL | GTGGTGGTGGACGTGAGC |
| | GGCTGTCCTACAGTCCTCAGGACTC | NO: 292]: | | RLSCAASGYTFTTYWITW | CACGAAGACCCTGAGGTC |
| | TACTCCCTCAGCAGCGTGGTGACCG | EVQLLESGGGLVQPGGSLRLSC | | VRQAPGKGLEWVSDIYPG | AAGTTCAACTGGTACGTG |
| | TGCCCTCCAGCAGCTTGGGCACCCA | AASGYTFTTYWITWVRQAPGKG | | SSICNYNEKFKSRFTISR | GACGGCGTGGAGGTGCAT |
| | GACCTACATCTGCAACGTGAATCAC | LEWVSDIYPGSSICNYNEKFKS | | DNSKNTLYLQMNSLRAED | AATGCCAAGACAAAGCCG |
| | AAGCCCAGCAACACCAAGGTGGACA | RFTISRDNSKNTLYLQMNSLRA | | TAVYYCAKEDGYDAWFAY | CGGGAGGAGCAGTACAAC |
| | AGAAAGTTGAGCCCAAATCTTGTGA | EDTAVYYCAKEDGYDAWFAYWG | | WGQGTLVTVSS | AGCACGTACCGTGTGGTC |
| | CAAAACTCACACATGCCCACCGTGC | QGTLVTVSSASTKGPSVFPLAP | | [SEQ ID NO: 295] | AGCGTCCTCACCGTCCTG |
| | CCAGCACCTGAACTCCTGGGGGGAC | SSKSTSGGTAALGCLVKDYFPE | | | CACCAGGACTGGCTGAAT |
| | CGTCAGTCTTCCTCTTCCCCCCAAA | PVTVSWNSGALTSGVHTFPAVL | | | GGCAAGGAGTACAAGTGC |
| | ACCCAAGGACACCCTCATGATCTCC | QSSGLYSLSSVVTVPSSSLGTQ | | | AAGGTCTCCAACAAAGCC |
| | CGGACCCCTGAGGTCACATGCGTGG | TYICNVNHKPSNTKVDKKVEPK | | | CTCCCAGCCCCCATCGAG |
| | TGGTGGACGTGAGCCACGAAGACCC | SCDKTHTCPPCPAPELLGGPSV | | | AAAACCATCTCCAAAGCC |
| | TGAGGTCAAGTTCAACTGGTACGTG | FLFPPKPKDTLMISRTPEVTCV | | | AAAGGGCAGCCCCGAGAA |
| | GACGGCGTGGAGGTGCATAATGCCA | VVDVSHEDPEVKFNWYVDGVEV | | | CCACAGGTGTACACCCTG |
| | AGACAAAGCCGCGGGAGGAGCAGTA | HNAKTKPREEQYNSTYRVVSVL | | | CCCCCATCCCGGGATGAG |
| | CAACAGCACGTACCGTGTGGTCAGC | TVLHQDWLNGKEYKCKVSNKAL | | | CTGACCAAGAACCAGGTC |
| | GTCCTCACCGTCCTGCACCAGGACT | PAPIEKTISKAKGQPREPQVYT | | | AGCCTGACCTGCCTGGTC |
| | GGCTGAATGGCAAGGAGTACAAGTG | LPPSRDELTKNQVSLTCLVKGF | | | AAAGGCTTCTATCCCAGC |
| | CAAGGTCTCCAACAAAGCCCTCCCA | YPSDIAVEWESNGQPENNYKTT | | | GACATCGCCGTGGAGTGG |
| | GCCCCCATCGAGAAAACCATCTCCA | PPVLDSDGSFFLYSKLTVDKSR | | | GAGAGCAATGGGCAGCCG |
| | AAGCCAAAGGGCAGCCCCGAGAACC | WQQGNVFSCSVMHEALHNHYTQ | | | GAGAACAACTACAAGACC |
| | ACAGGTGTACACCCTGCCCCCATCC | KSLSLSPGK | | | ACGCCTCCCGTGCTGGAC |
| | CGGGATGAGCTGACCAAGAACCAGG | | | | TCCGACGGCTCCTTCTTC |
| | TCAGCCTGACCTGCCTGGTCAAAGG | | | | TTATATTCAAAGCTCACC |
| | CTTCTATCCCAGCGACATCGCCGTG | | | | GTGGACAAGAGCAGGTGG |
| | GAGTGGGAGAGCAATGGGCAGCCGG | | | | CAGCAGGGGAACGTCTTC |
| | AGAACAACTACAAGACCACGCCTCC | | | | TCATGCTCCGTGATGCAT |
| | CGTGCTGGACTCCGACGGCTCCTTC | | | | GAGGCTCTGCACAACCAC |
| | TTCTTATATTCAAAGCTCACCGTGG | | | | TACACGCAGAAGAGCCTC |
| | ACAAGAGCAGGTGGCAGCAGGGGAA | | | | TCCCTGTCTCCCGGG |
| | CGTCTTCTCATGCTCCGTGATGCAT | | | | (Nucleotides 415 |
| | GAGGCTCTGCACAACCACTACACGC | | | | to 1401 of SEQ ID |
| | AGAAGAGCCTCTCCCTGTCTCCCGG | | | | NO: 289) |
| | GAAATGA | | | | [SEQ ID NO: 296] |
| | Without leader [SEQ ID | | | | ASTKGPSVFPLAPSSKST |
| | NO: 290]: | | | | SGGTAALGCLVKDYFPEP |
| | GAAGTGCAGCTGCTGGAATCTGGCG | | | | VTVSWNSGALTSGVHTFP |
| | GCGGACTGGTGCAGCCTGGCGGCTC | | | | AVLQSSGLYSLSSVVTVP |
| | TCTGAGACTGTCTTGTGCCGCCTCC | | | | SSSLGTQTYICNVNHKPS |
| | GGCTACACCTTCACCACCTACTGGA | | | | NTKVDKKVEPKSCDKTHT |
| | TCACCTGGGTCCGACAGGCTCCCGG | | | | CPPCPAPELLGGPSVFLF |
| | CAAGGGACTGGAATGGGTGTCCGAC | | | | PPKPKDTLMISRTPEVTC |
| | ATCTACCCCGGCTCCTCCATCTGCA | | | | VVVDVSHEDPEVKFNWYV |
| | ACTACAACGAGAAGTTCAAGTCCCG | | | | DGVEVHNAKTKPREEQYN |
| | GTTCACCATCTCCCGGGACAACTCC | | | | STYRVVSVLTVLHQDWLN |
| | AAGAACACCCTGTACCTCCAGATGA | | | | GKEYKCKVSNKALPAPIE |
| | ACTCCCTGCGGGCCGAGGACACCGC | | | | KTISKAKGQPREPQVYTL |
| | CGTGTACTACTGTGCCAAAGAGGAC | | | | PPSRDELTKNQVSLTCLV |
| | GGCTACGACGCTTGGTTTGCCTACT | | | | KGFYPSDIAVEWESNGQP |
| | GGGGCCAGGGCACCCTGGTCACCGT | | | | ENNYKTTPPVLDSDGSFF |
| | GTCATCTGCATCCACCAAGGGCCCA | | | | LYSKLTVDKSRWQQGNVF |
| | TCGGTCTTCCCCCTGGCACCCTCCT | | | | SCSVMHEALHNHYTQKSL |
| | CCAAGAGCACCTCTGGGGGCACAGC | | | | SLSPGK |
| | GGCCCTGGGCTGCCTGGTCAAGGAC | | | | [SEQ ID NO: 297] |
| | TACTTCCCCGAACCGGTGACGGTGT | | | | |
| | CGTGGAACTCAGGCGCCCTGACCAG | | | | |
| | CGGCGTGCACACCTTCCCGGCTGTC | | | | |
| | CTACAGTCCTCAGGACTCTACTCCC | | | | |
| | TCAGCAGCGTGGTGACCGTGCCCTC | | | | |
| | CAGCAGCTTGGGCACCCAGACCTAC | | | | |
| | ATCTGCAACGTGAATCACAAGCCCA | | | | |
| | GCAACACCAAGGTGGACAAGAAAGT | | | | |
| | TGAGCCCAAATCTTGTGACAAAACT | | | | |
| | CACACATGCCCACCGTGCCCAGCAC | | | | |
| | CTGAACTCCTGGGGGGACCGTCAGT | | | | |
| | CTTCCTCTTCCCCCCAAAACCCAAG | | | | |
| | GACACCCTCATGATCTCCCGGACCC | | | | |
| | CTGAGGTCACATGCGTGGTGGTGGA | | | | |
| | CGTGAGCCACGAAGACCCTGAGGTC | | | | |
| | AAGTTCAACTGGTACGTGGACGGCG | | | | |
| | TGGAGGTGCATAATGCCAAGACAAA | | | | |
| | GCCGCGGGAGGAGCAGTACAACAGC | | | | |
| | ACGTACCGTGTGGTCAGCGTCCTCA | | | | |
| | CCGTCCTGCACCAGGACTGGCTGAA | | | | |
| | TGGCAAGGAGTACAAGTGCAAGGTC | | | | |
| | TCCAACAAAGCCCTCCCAGCCCCCA | | | | |
| | TCGAGAAAACCATCTCCAAAGCCAA | | | | |
| | AGGGCAGCCCCGAGAACCACAGGTG | | | | |
| | TACACCCTGCCCCCATCCCGGGATG | | | | |
| | AGCTGACCAAGAACCAGGTCAGCCT | | | | |
| | GACCTGCCTGGTCAAAGGCTTCTAT | | | | |
| | CCCAGCGACATCGCCGTGGAGTGGG | | | | |
| | AGAGCAATGGGCAGCCGGAGAACAA | | | | |
| | CTACAAGACCACGCCTCCCGTGCTG | | | | |
| | GACTCCGACGGCTCCTTCTTCTTAT | | | | |
| | ATTCAAAGCTCACCGTGGACAAGAG | | | | |
| | CAGGTGGCAGCAGGGGAACGTCTTC | | | | |
| | TCATGCTCCGTGATGCATGAGGCTC | | | | |
| | TGCACAACCACTACACGCAGAAGAG | | | | |
| | CCTCTCCCTGTCTCCCGGGAAATGA | | | | |
| 7G6- | With leader [SEQ ID NO: | With leader [SEQ ID | ATGGGCTG | GAAGTGCAGCTGCTGGAA | GCATCCACCAAGGGCCCA |
| HCzu12 | 298]: | NO: 300] | GTCCTGCA | TCTGGCGGCGGACTGGTG | TCGGTCTTCCCCCTGGCA |
| | ATGGGCTGGTCCTGCATCATCCTGT | MGWSCIILFLVATATGVHSEVQ | TCATCCTG | CAGCCTGGCGGCTCTCTG | CCCTCCTCCAAGAGCACC |
| | TTCTGGTGGCCACCGCCACCGGCGT | LLESGGGLVQPGGSLRLSCAAS | TTTCTGGT | AGACTGTCTTGTGCCGCC | TCTGGGGGCACAGCGGCC |
| | GCACAGCGAAGTGCAGCTGCTGGAA | GYTFTTYWITWVRQAPGKGLEW | GGCCACCG | TCCGGCTACACCTTCACC | CTGGGCTGCCTGGTCAAG |
| | TCTGGCGGCGGACTGGTGCAGCCTG | VGDIYPGSSICNYNEKFKSRFT | CCACCGGC | ACCTACTGGATCACCTGG | GACTACTTCCCCGAACCG |
| | GCGGCTCTCTGAGACTGTCTTGTGC | ISVDNSKSTAYLQMNSLRAEDT | GTGCACAG | GTCCGACAGGCTCCCGGC | GTGACGGTGTCGTGGAAC |
| | CGCCTCCGGCTACACCTTCACCACC | AVYYCAREDGYDAWFAYWGQGT | C | AAGGGACTGGAATGGGTC | TCAGGCGCCCTGACCAGC |
| | TACTGGATCACCTGGGTCCGACAGG | LVTVSSASTKGPSVFPLAPSSK | (Nucleo- | GGAGACATCTACCCCGGC | GGCGTGCACACCTTCCCG |
| | CTCCCGGCAAGGGACTGGAATGGGT | STSGGTAALGCLVKDYFPEPVT | tides 1 | TCCTCCATCTGCAACTAC | GCTGTCCTACAGTCCTCA |
| | CGGAGACATCTACCCCGGCTCCTCC | VSWNSGALTSGVHTFPAVLQSS | to 57 of | AACGAGAAGTTCAAGTCC | GGACTCTACTCCCTCAGC |
| | ATCTGCAACTACAACGAGAAGTTCA | GLYSLSSVVTVPSSSLGTQTYI | SEQ ID | CGGTTCACCATCTCCGTG | AGCGTGGTGACCGTGCCC |
| | AGTCCCGGTTCACCATCTCCGTGGA | CNVNHKPSNTKVDKKVEPKSCD | NO: 298) | GACAACTCCAAGTCCACC | TCCAGCAGCTTGGGCACC |
| | CAACTCCAAGTCCACCGCCTACCTC | KTHTCPPCPAPELLGGPSVFLF | [SEQ ID | GCCTACCTCCAGATGAAC | CAGACCTACATCTGCAAC |
| | CAGATGAACTCCCTGAGAGCCGAGG | PPKPKDTLMISRTPEVTCVVVD | NO: 302] | TCCCTGAGAGCCGAGGAC | GTGAATCACAAGCCCAGC |
| | ACACCGCCGTGTACTACTGCGCCAG | VSHEDPEVKFNWYVDGVEVHNA | | ACCGCCGTGTACTACTGC | AACACCAAGGTGGACAAG |
| | AGAGGACGGCTACGACGCTTGGTTT | KTKPREEQYNSTYRVVSVLTVL | | GCCAGAGAGGACGGCTAC | AAAGTTGAGCCCAAATCT |
| | GCTTACTGGGGCCAGGGCACCCTGG | HQDWLNGKEYKCKVSNKALPAP | | GACGCTTGGTTTGCTTAC | TGTGACAAAACTCACACA |
| | TCACCGTGTCATCTGCATCCACCAA | IEKTISKAKGQPREPQVYTLPP | | TGGGGCCAGGGCACCCTG | TGCCCACCGTGCCCAGCA |
| | GGGCCCATCGGTCTTCCCCCTGGCA | SRDELTKNQVSLTCLVKGFYPS | | GTCACCGTGTCATCT | CCTGAACTCCTGGGGGGA |
| | CCCTCCTCCAAGAGCACCTCTGGGG | DIAVEWESNGQPENNYKTTPPV | | (Nucleotides 58 to | CCGTCAGTCTTCCTCTTC |
| | GCACAGCGGCCCTGGGCTGCCTGGT | LDSDGSFFLYSKLTVDKSRWQQ | | 414 of SEQ ID NO: | CCCCCAAAACCCAAGGAC |
| | CAAGGACTACTTCCCCGAACCGGTG | GNVFSCSVMHEALHNHYTQKSL | | 298) | ACCCTCATGATCTCCCGG |
| | ACGGTGTCGTGGAACTCAGGCGCCC | SLSPGK | | [SEQ ID NO: 303] | ACCCCTGAGGTCACATGC |
| | TGACCAGCGGCGTGCACACCTTCCC | Without leader [SEQ ID | | EVQLLESGGGLVQPGGSL | GTGGTGGTGGACGTGAGC |
| | GGCTGTCCTACAGTCCTCAGGACTC | NO: 301]: | | RLSCAASGYTFTTYWITW | CACGAAGACCCTGAGGTC |
| | TACTCCCTCAGCAGCGTGGTGACCG | EVQLLESGGGLVQPGGSLRLSC | | VRQAPGKGLEWVGDIYPG | AAGTTCAACTGGTACGTG |
| | TGCCCTCCAGCAGCTTGGGCACCCA | AASGYTFTTYWITWVRQAPGKG | | SSICNYNEKFKSRFTISV | GACGGCGTGGAGGTGCAT |
| | GACCTACATCTGCAACGTGAATCAC | LEWVGDIYPGSSICNYNEKFKS | | DNSKSTAYLQMNSLRAED | AATGCCAAGACAAAGCCG |
| | AAGCCCAGCAACACCAAGGTGGACA | RFTISVDNSKSTAYLQMNSLRA | | TAVYYCAREDGYDAWFAY | CGGGAGGAGCAGTACAAC |
| | AGAAAGTTGAGCCCAAATCTTGTGA | EDTAVYYCAREDGYDAWFAYWG | | WGQGTLVTVSS | AGCACGTACCGTGTGGTC |
| | CAAAACTCACACATGCCCACCGTGC | QGTLVTVSSASTKGPSVFPLAP | | [SEQ ID NO: 304] | AGCGTCCTCACCGTCCTG |
| | CCAGCACCTGAACTCCTGGGGGGAC | SSKSTSGGTAALGCLVKDYFPE | | | CACCAGGACTGGCTGAAT |
| | CGTCAGTCTTCCTCTTCCCCCCAAA | PVTVSWNSGALTSGVHTFPAVL | | | GGCAAGGAGTACAAGTGC |
| | ACCCAAGGACACCCTCATGATCTCC | QSSGLYSLSSVVTVPSSSLGTQ | | | AAGGTCTCCAACAAAGCC |
| | CGGACCCCTGAGGTCACATGCGTGG | TYICNVNHKPSNTKVDKKVEPK | | | CTCCCAGCCCCCATCGAG |
| | TGGTGGACGTGAGCCACGAAGACCC | SCDKTHTCPPCPAPELLGGPSV | | | AAAACCATCTCCAAAGCC |
| | TGAGGTCAAGTTCAACTGGTACGTG | FLFPPKPKDTLMISRTPEVTCV | | | AAAGGGCAGCCCCGAGAA |
| | GACGGCGTGGAGGTGCATAATGCCA | VVDVSHEDPEVKFNWYVDGVEV | | | CCACAGGTGTACACCCTG |
| | AGACAAAGCCGCGGGAGGAGCAGTA | HNAKTKPREEQYNSTYRVVSVL | | | CCCCCATCCCGGGATGAG |
| | CAACAGCACGTACCGTGTGGTCAGC | TVLHQDWLNGKEYKCKVSNKAL | | | CTGACCAAGAACCAGGTC |
| | GTCCTCACCGTCCTGCACCAGGACT | PAPIEKTISKAKGQPREPQVYT | | | AGCCTGACCTGCCTGGTC |
| | GGCTGAATGGCAAGGAGTACAAGTG | LPPSRDELTKNQVSLTCLVKGF | | | AAAGGCTTCTATCCCAGC |
| | CAAGGTCTCCAACAAAGCCCTCCCA | YPSDIAVEWESNGQPENNYKTT | | | GACATCGCCGTGGAGTGG |
| | GCCCCCATCGAGAAAACCATCTCCA | PPVLDSDGSFFLYSKLTVDKSR | | | GAGAGCAATGGGCAGCCG |
| | AAGCCAAAGGGCAGCCCCGAGAACC | WQQGNVFSCSVMHEALHNHYTQ | | | GAGAACAACTACAAGACC |
| | ACAGGTGTACACCCTGCCCCCATCC | KSLSLSPGK | | | ACGCCTCCCGTGCTGGAC |
| | CGGGATGAGCTGACCAAGAACCAGG | | | | TCCGACGGCTCCTTCTTC |
| | TCAGCCTGACCTGCCTGGTCAAAGG | | | | TTATATTCAAAGCTCACC |
| | CTTCTATCCCAGCGACATCGCCGTG | | | | GTGGACAAGAGCAGGTGG |
| | GAGTGGGAGAGCAATGGGCAGCCGG | | | | CAGCAGGGGAACGTCTTC |
| | AGAACAACTACAAGACCACGCCTCC | | | | TCATGCTCCGTGATGCAT |
| | CGTGCTGGACTCCGACGGCTCCTTC | | | | GAGGCTCTGCACAACCAC |
| | TTCTTATATTCAAAGCTCACCGTGG | | | | TACACGCAGAAGAGCCTC |
| | ACAAGAGCAGGTGGCAGCAGGGGAA | | | | TCCCTGTCTCCCGGG |
| | CGTCTTCTCATGCTCCGTGATGCAT | | | | (Nucleotides 415 |
| | GAGGCTCTGCACAACCACTACACGC | | | | to 1401) |
| | AGAAGAGCCTCTCCCTGTCTCCCGG | | | | [SEQ ID NO: 305] |
| | GAAATGA | | | | ASTKGPSVFPLAPSSKST |
| | Without leader [SEQ ID | | | | SGGTAALGCLVKDYFPEP |
| | NO: 299]: | | | | VTVSWNSGALTSGVHTFP |
| | GAAGTGCAGCTGCTGGAATCTGGCG | | | | AVLQSSGLYSLSSVVTVP |
| | GCGGACTGGTGCAGCCTGGCGGCTC | | | | SSSLGTQTYICNVNHKPS |
| | TCTGAGACTGTCTTGTGCCGCCTCC | | | | NTKVDKKVEPKSCDKTHT |
| | GGCTACACCTTCACCACCTACTGGA | | | | CPPCPAPELLGGPSVFLF |
| | TCACCTGGGTCCGACAGGCTCCCGG | | | | PPKPKDTLMISRTPEVTC |
| | CAAGGGACTGGAATGGGTCGGAGAC | | | | VVVDVSHEDPEVKFNWYV |
| | ATCTACCCCGGCTCCTCCATCTGCA | | | | DGVEVHNAKTKPREEQYN |
| | ACTACAACGAGAAGTTCAAGTCCCG | | | | STYRVVSVLTVLHQDWLN |
| | GTTCACCATCTCCGTGGACAACTCC | | | | GKEYKCKVSNKALPAPIE |
| | AAGTCCACCGCCTACCTCCAGATGA | | | | KTISKAKGQPREPQVYTL |
| | ACTCCCTGAGAGCCGAGGACACCGC | | | | PPSRDELTKNQVSLTCLV |
| | CGTGTACTACTGCGCCAGAGAGGAC | | | | KGFYPSDIAVEWESNGQP |
| | GGCTACGACGCTTGGTTTGCTTACT | | | | ENNYKTTPPVLDSDGSFF |
| | GGGGCCAGGGCACCCTGGTCACCGT | | | | LYSKLTVDKSRWQQGNVF |
| | GTCATCTGCATCCACCAAGGGCCCA | | | | SCSVMHEALHNHYTQKSL |
| | TCGGTCTTCCCCCTGGCACCCTCCT | | | | SLSPGK |
| | CCAAGAGCACCTCTGGGGGCACAGC | | | | [SEQ ID NO: 306] |
| | GGCCCTGGGCTGCCTGGTCAAGGAC | | | | |
| | TACTTCCCCGAACCGGTGACGGTGT | | | | |
| | CGTGGAACTCAGGCGCCCTGACCAG | | | | |
| | CGGCGTGCACACCTTCCCGGCTGTC | | | | |
| | CTACAGTCCTCAGGACTCTACTCCC | | | | |
| | TCAGCAGCGTGGTGACCGTGCCCTC | | | | |
| | CAGCAGCTTGGGCACCCAGACCTAC | | | | |
| | ATCTGCAACGTGAATCACAAGCCCA | | | | |
| | GCAACACCAAGGTGGACAAGAAAGT | | | | |
| | TGAGCCCAAATCTTGTGACAAAACT | | | | |
| | CACACATGCCCACCGTGCCCAGCAC | | | | |
| | CTGAACTCCTGGGGGGACCGTCAGT | | | | |
| | CTTCCTCTTCCCCCCAAAACCCAAG | | | | |
| | GACACCCTCATGATCTCCCGGACCC | | | | |
| | CTGAGGTCACATGCGTGGTGGTGGA | | | | |
| | CGTGAGCCACGAAGACCCTGAGGTC | | | | |
| | AAGTTCAACTGGTACGTGGACGGCG | | | | |
| | TGGAGGTGCATAATGCCAAGACAAA | | | | |
| | GCCGCGGGAGGAGCAGTACAACAGC | | | | |
| | ACGTACCGTGTGGTCAGCGTCCTCA | | | | |
| | CCGTCCTGCACCAGGACTGGCTGAA | | | | |
| | TGGCAAGGAGTACAAGTGCAAGGTC | | | | |
| | TCCAACAAAGCCCTCCCAGCCCCCA | | | | |
| | TCGAGAAAACCATCTCCAAAGCCAA | | | | |
| | AGGGCAGCCCCGAGAACCACAGGTG | | | | |
| | TACACCCTGCCCCCATCCCGGGATG | | | | |
| | AGCTGACCAAGAACCAGGTCAGCCT | | | | |
| | GACCTGCCTGGTCAAAGGCTTCTAT | | | | |
| | CCCAGCGACATCGCCGTGGAGTGGG | | | | |
| | AGAGCAATGGGCAGCCGGAGAACAA | | | | |
| | CTACAAGACCACGCCTCCCGTGCTG | | | | |
| | GACTCCGACGGCTCCTTCTTCTTAT | | | | |
| | ATTCAAAGCTCACCGTGGACAAGAG | | | | |
| | CAGGTGGCAGCAGGGGAACGTCTTC | | | | |
| | TCATGCTCCGTGATGCATGAGGCTC | | | | |
| | TGCACAACCACTACACGCAGAAGAG | | | | |
| | CCTCTCCCTGTCTCCCGGGAAATGA | | | | |
| 7G6- | With leader [SEQ ID NO: | With leader [SEQ ID | ATGGGCTG | GAAGTGCAGCTGCTGGAA | GCATCCACCAAGGGCCCA |
| HCzu13 | 307]: | NO: 309]: | GTCCTGCA | TCTGGCGGCGGACTGGTG | TCGGTCTTCCCCCTGGCA |
| | ATGGGCTGGTCCTGCATCATCCTGT | MGWSCIILFLVATATGVHSEVQ | TCATCCTG | CAGCCTGGCGGCTCTCTG | CCCTCCTCCAAGAGCACC |
| | TTCTGGTGGCCACCGCCACCGGCGT | LLESGGGLVQPGGSLRLSCAAS | TTTCTGGT | AGACTGTCTTGTGCCGCC | TCTGGGGGCACAGCGGCC |
| | GCACAGCGAAGTGCAGCTGCTGGAA | GYTFTTYWITWVRQAPGKGLEW | GGCCACCG | TCCGGCTACACCTTCACC | CTGGGCTGCCTGGTCAAG |
| | TCTGGCGGCGGACTGGTGCAGCCTG | VGDIYPGSSICNYADSVKGRFT | CCACCGGC | ACCTACTGGATCACCTGG | GACTACTTCCCCGAACCG |
| | GCGGCTCTCTGAGACTGTCTTGTGC | ISVDNSKSTAYLQMNSLRAEDT | GTGCACAG | GTCCGACAGGCTCCCGGC | GTGACGGTGTCGTGGAAC |
| | CGCCTCCGGCTACACCTTCACCACC | AVYYCAREDGYDAWFAYWGQGT | C | AAGGGACTGGAATGGGTC | TCAGGCGCCCTGACCAGC |
| | TACTGGATCACCTGGGTCCGACAGG | LVTVSSASTKGPSVFPLAPSSK | (Nucleo- | GGAGACATCTACCCCGGC | GGCGTGCACACCTTCCCG |
| | CTCCCGGCAAGGGACTGGAATGGGT | STSGGTAALGCLVKDYFPEPVT | tides 1 | TCCTCCATCTGCAACTAC | GCTGTCCTACAGTCCTCA |
| | CGGAGACATCTACCCCGGCTCCTCC | VSWNSGALTSGVHTFPAVLQSS | to 57 of | GCCGACTCCGTCAAGGGC | GGACTCTACTCCCTCAGC |
| | ATCTGCAACTACGCCGACTCCGTCA | GLYSLSSVVTVPSSSLGTQTYI | SEQ ID | CGGTTCACCATCTCCGTG | AGCGTGGTGACCGTGCCC |
| | AGGGCCGGTTCACCATCTCCGTGGA | CNVNHKPSNTKVDKKVEPKSCD | NO: 307) | GACAACTCCAAGTCCACC | TCCAGCAGCTTGGGCACC |
| | CAACTCCAAGTCCACCGCCTACCTC | KTHTCPPCPAPELLGGPSVFLF | [SEQ ID | GCCTACCTCCAGATGAAC | CAGACCTACATCTGCAAC |
| | CAGATGAACTCCCTGAGAGCCGAGG | PPKPKDTLMISRTPEVTCVVVD | NO: 311] | TCCCTGAGAGCCGAGGAC | GTGAATCACAAGCCCAGC |
| | ACACCGCCGTGTACTACTGCGCCAG | VSHEDPEVKFNWYVDGVEVHNA | | ACCGCCGTGTACTACTGC | AACACCAAGGTGGACAAG |
| | AGAGGACGGCTACGACGCTTGGTTT | KTKPREEQYNSTYRVVSVLTVL | | GCCAGAGAGGACGGCTAC | AAAGTTGAGCCCAAATCT |
| | GCTTACTGGGGCCAGGGCACCCTGG | HQDWLNGKEYKCKVSNKALPAP | | GACGCTTGGTTTGCTTAC | TGTGACAAAACTCACACA |
| | TCACCGTGTCATCTGCATCCACCAA | IEKTISKAKGQPREPQVYTLPP | | TGGGGCCAGGGCACCCTG | TGCCCACCGTGCCCAGCA |
| | GGGCCCATCGGTCTTCCCCCTGGCA | SRDELTKNQVSLTCLVKGFYPS | | GTCACCGTGTCATCT | CCTGAACTCCTGGGGGGA |
| | CCCTCCTCCAAGAGCACCTCTGGGG | DIAVEWESNGQPENNYKTTPPV | | (Nucleotides 58 to | CCGTCAGTCTTCCTCTTC |
| | GCACAGCGGCCCTGGGCTGCCTGGT | LDSDGSFFLYSKLTVDKSRWQQ | | 414 of SEQ ID NO: | CCCCCAAAACCCAAGGAC |
| | CAAGGACTACTTCCCCGAACCGGTG | GNVFSCSVMHEALHNHYTQKSL | | 307) [SEQ ID NO: | ACCCTCATGATCTCCCGG |
| | ACGGTGTCGTGGAACTCAGGCGCCC | SLSPGK | | 312] | ACCCCTGAGGTCACATGC |
| | TGACCAGCGGCGTGCACACCTTCCC | Without leader [SEQ ID | | EVQLLESGGGLVQPGGSL | GTGGTGGTGGACGTGAGC |
| | GGCTGTCCTACAGTCCTCAGGACTC | NO: 310]: | | RLSCAASGYTFTTYWITW | CACGAAGACCCTGAGGTC |
| | TACTCCCTCAGCAGCGTGGTGACCG | EVQLLESGGGLVQPGGSLRLSC | | VRQAPGKGLEWVGDIYPG | AAGTTCAACTGGTACGTG |
| | TGCCCTCCAGCAGCTTGGGCACCCA | AASGYTFTTYWITWVRQAPGKG | | SSICNYADSVKGRFTISV | GACGGCGTGGAGGTGCAT |
| | GACCTACATCTGCAACGTGAATCAC | LEWVGDIYPGSSICNYADSVKG | | DNSKSTAYLQMNSLRAED | AATGCCAAGACAAAGCCG |
| | AAGCCCAGCAACACCAAGGTGGACA | RFTISVDNSKSTAYLQMNSLRA | | TAVYYCAREDGYDAWFAY | CGGGAGGAGCAGTACAAC |
| | AGAAAGTTGAGCCCAAATCTTGTGA | EDTAVYYCAREDGYDAWFAYWG | | WGQGTLVTVSS | AGCACGTACCGTGTGGTC |
| | CAAAACTCACACATGCCCACCGTGC | QGTLVTVSSASTKGPSVFPLAP | | [SEQ ID NO: 313] | AGCGTCCTCACCGTCCTG |
| | CCAGCACCTGAACTCCTGGGGGGAC | SSKSTSGGTAALGCLVKDYFPE | | | CACCAGGACTGGCTGAAT |
| | CGTCAGTCTTCCTCTTCCCCCCAAA | PVTVSWNSGALTSGVHTFPAVL | | | GGCAAGGAGTACAAGTGC |
| | ACCCAAGGACACCCTCATGATCTCC | QSSGLYSLSSVVTVPSSSIGTQ | | | AAGGTCTCCAACAAAGCC |
| | CGGACCCCTGAGGTCACATGCGTGG | TYICNVNHKPSNTKVDKKVEPK | | | CTCCCAGCCCCCATCGAG |
| | TGGTGGACGTGAGCCACGAAGACCC | SCDKTHTCPPCPAPELLGGPSV | | | AAAACCATCTCCAAAGCC |
| | TGAGGTCAAGTTCAACTGGTACGTG | FLFPPKPKDTLMISRTPEVTCV | | | AAAGGGCAGCCCCGAGAA |
| | GACGGCGTGGAGGTGCATAATGCCA | VVDVSHEDPEVKFNWYVDGVEV | | | CCACAGGTGTACACCCTG |
| | AGACAAAGCCGCGGGAGGAGCAGTA | HNAKTKPREEQYNSTYRVVSVL | | | CCCCCATCCCGGGATGAG |
| | CAACAGCACGTACCGTGTGGTCAGC | TVLHQDWLNGKEYKCKVSNKAL | | | CTGACCAAGAACCAGGTC |
| | GTCCTCACCGTCCTGCACCAGGACT | PAPIEKTISKAKGQPREPQVYT | | | AGCCTGACCTGCCTGGTC |
| | GGCTGAATGGCAAGGAGTACAAGTG | LPPSRDELTKNQVSLTCLVKGF | | | AAAGGCTTCTATCCCAGC |
| | CAAGGTCTCCAACAAAGCCCTCCCA | YPSDIAVEWESNGQPENNYKTT | | | GACATCGCCGTGGAGTGG |
| | GCCCCCATCGAGAAAACCATCTCCA | PPVLDSDGSFFLYSKLTVDKSR | | | GAGAGCAATGGGCAGCCG |
| | AAGCCAAAGGGCAGCCCCGAGAACC | WQQGNVFSCSVMHEALHNHYTQ | | | GAGAACAACTACAAGACC |
| | ACAGGTGTACACCCTGCCCCCATCC | KSLSLSPGK | | | ACGCCTCCCGTGCTGGAC |
| | CGGGATGAGCTGACCAAGAACCAGG | | | | TCCGACGGCTCCTTCTTC |
| | TCAGCCTGACCTGCCTGGTCAAAGG | | | | TTATATTCAAAGCTCACC |
| | CTTCTATCCCAGCGACATCGCCGTG | | | | GTGGACAAGAGCAGGTGG |
| | GAGTGGGAGAGCAATGGGCAGCCGG | | | | CAGCAGGGGAACGTCTTC |
| | AGAACAACTACAAGACCACGCCTCC | | | | TCATGCTCCGTGATGCAT |
| | CGTGCTGGACTCCGACGGCTCCTTC | | | | GAGGCTCTGCACAACCAC |
| | TTCTTATATTCAAAGCTCACCGTGG | | | | TACACGCAGAAGAGCCTC |
| | ACAAGAGCAGGTGGCAGCAGGGGAA | | | | TCCCTGTCTCCCGGG |
| | CGTCTTCTCATGCTCCGTGATGCAT | | | | (Nucleotides 415 |
| | GAGGCTCTGCACAACCACTACACGC | | | | to 1401 of SEQ ID |
| | AGAAGAGCCTCTCCCTGTCTCCCGG | | | | NO: 307) |
| | GAAATGA | | | | [SEQ ID NO: 314] |
| | Without leader [SEQ ID | | | | ASTKGPSVFPLAPSSKST |
| | NO: 308]: | | | | SGGTAALGCLVKDYFPEP |
| | GAAGTGCAGCTGCTGGAATCTGGCG | | | | VTVSWNSGALTSGVHTFP |
| | GCGGACTGGTGCAGCCTGGCGGCTC | | | | AVLQSSGLYSLSSVVTVP |
| | TCTGAGACTGTCTTGTGCCGCCTCC | | | | SSSLGTQTYI CNVNHKPS |
| | GGCTACACCTTCACCACCTACTGGA | | | | NTKVDKKVEPKSCDKTHT |
| | TCACCTGGGTCCGACAGGCTCCCGG | | | | CPPCPAPELLGGPSVFLF |
| | CAAGGGACTGGAATGGGTCGGAGAC | | | | PPKPKDTLMISRTPEVTC |
| | ATCTACCCCGGCTCCTCCATCTGCA | | | | VVVDVSHEDPEVKFNWYV |
| | ACTACGCCGACTCCGTCAAGGGCCG | | | | DGVEVHNAKTKPREEQYN |
| | GTTCACCATCTCCGTGGACAACTCC | | | | STYRVVSVLTVLHQDWLN |
| | AAGTCCACCGCCTACCTCCAGATGA | | | | GKEYKCKVSNKALPAPIE |
| | ACTCCCTGAGAGCCGAGGACACCGC | | | | KTISKAKGQPREPQVYTL |
| | CGTGTACTACTGCGCCAGAGAGGAC | | | | PPSRDELTKNQVSLTCLV |
| | GGCTACGACGCTTGGTTTGCTTACT | | | | KGFYPSDIAVEWESNGQP |
| | GGGGCCAGGGCACCCTGGTCACCGT | | | | ENNYKTTPPVLDSDGSFF |
| | GTCATCTGCATCCACCAAGGGCCCA | | | | LYSKLTVDKSRWQQGNVF |
| | TCGGTCTTCCCCCTGGCACCCTCCT | | | | SCSVMHEALHNHYTQKSL |
| | CCAAGAGCACCTCTGGGGGCACAGC | | | | SLSPGK |
| | GGCCCTGGGCTGCCTGGTCAAGGAC | | | | [SEQ ID NO: 315] |
| | TACTTCCCCGAACCGGTGACGGTGT | | | | |
| | CGTGGAACTCAGGCGCCCTGACCAG | | | | |
| | CGGCGTGCACACCTTCCCGGCTGTC | | | | |
| | CTACAGTCCTCAGGACTCTACTCCC | | | | |
| | TCAGCAGCGTGGTGACCGTGCCCTC | | | | |
| | CAGCAGCTTGGGCACCCAGACCTAC | | | | |
| | ATCTGCAACGTGAATCACAAGCCCA | | | | |
| | GCAACACCAAGGTGGACAAGAAAGT | | | | |
| | TGAGCCCAAATCTTGTGACAAAACT | | | | |
| | CACACATGCCCACCGTGCCCAGCAC | | | | |
| | CTGAACTCCTGGGGGGACCGTCAGT | | | | |
| | CTTCCTCTTCCCCCCAAAACCCAAG | | | | |
| | GACACCCTCATGATCTCCCGGACCC | | | | |
| | CTGAGGTCACATGCGTGGTGGTGGA | | | | |
| | CGTGAGCCACGAAGACCCTGAGGTC | | | | |
| | AAGTTCAACTGGTACGTGGACGGCG | | | | |
| | TGGAGGTGCATAATGCCAAGACAAA | | | | |
| | GCCGCGGGAGGAGCAGTACAACAGC | | | | |
| | ACGTACCGTGTGGTCAGCGTCCTCA | | | | |
| | CCGTCCTGCACCAGGACTGGCTGAA | | | | |
| | TGGCAAGGAGTACAAGTGCAAGGTC | | | | |
| | TCCAACAAAGCCCTCCCAGCCCCCA | | | | |
| | TCGAGAAAACCATCTCCAAAGCCAA | | | | |
| | AGGGCAGCCCCGAGAACCACAGGTG | | | | |
| | TACACCCTGCCCCCATCCCGGGATG | | | | |
| | AGCTGACCAAGAACCAGGTCAGCCT | | | | |
| | GACCTGCCTGGTCAAAGGCTTCTAT | | | | |
| | CCCAGCGACATCGCCGTGGAGTGGG | | | | |
| | AGAGCAATGGGCAGCCGGAGAACAA | | | | |
| | CTACAAGACCACGCCTCCCGTGCTG | | | | |
| | GACTCCGACGGCTCCTTCTTCTTAT | | | | |
| | ATTCAAAGCTCACCGTGGACAAGAG | | | | |
| | CAGGTGGCAGCAGGGGAACGTCTTC | | | | |
| | TCATGCTCCGTGATGCATGAGGCTC | | | | |
| | TGCACAACCACTACACGCAGAAGAG | | | | |
| | CCTCTCCCTGTCTCCCGGGAAATGA | | | | |
| 7G6- | With leader [SEQ ID NO: | With leader [SEQ ID | ATGGGCTG | GAAGTGCAGCTGCTGGAA | GCATCCACCAAGGGCCCA |
| HCzu14 | 316]: | NO: 317]: | GTCCTGCA | TCTGGCGGCGGACTGGTG | TCGGTCTTCCCCCTGGCA |
| | ATGGGCTGGTCCTGCATCATCCTGT | MGWSCIILFLVATATGVHSEVQ | TCATCCTG | CAGCCTGGCGGCTCTCTG | CCCTCCTCCAAGAGCACC |
| | TTCTGGTGGCCACCGCCACCGGCGT | LLESGGGLVQPGGSLRLSCAAS | TTTCTGGT | AGACTGTCTTGTGCCGCC | TCTGGGGGCACAGCGGCC |
| | GCACAGCGAAGTGCAGCTGCTGGAA | GYTFTTYWITWVRQAPGKGLEW | GGCCACCG | TCCGGCTACACCTTCACC | CTGGGCTGCCTGGTCAAG |
| | TCTGGCGGCGGACTGGTGCAGCCTG | VGDIYPGSSICNYADKFKGRFT | CCACCGGC | ACCTACTGGATCACCTGG | GACTACTTCCCCGAACCG |
| | GCGGCTCTCTGAGACTGTCTTGTGC | ISVDNSKSTAYLQMNSLRAEDT | GTGCACAG | GTCCGACAGGCTCCCGGC | GTGACGGTGTCGTGGAAC |
| | CGCCTCCGGCTACACCTTCACCACC | AVYYCAREDGYDAWFAYWGQGT | C | AAGGGACTGGAATGGGTC | TCAGGCGCCCTGACCAGC |
| | TACTGGATCACCTGGGTCCGACAGG | LVTVSSASTKGPSVFPLAPSSK | (Nucleo- | GGAGACATCTACCCCGGC | GGCGTGCACACCTTCCCG |
| | CTCCCGGCAAGGGACTGGAATGGGT | STSGGTAALGCLVKDYFPEPVT | tides 1 | TCCTCCATCTGCAACTAC | GCTGTCCTACAGTCCTCA |
| | CGGAGACATCTACCCCGGCTCCTCC | VSWNSGALTSGVHTFPAVLQSS | to 57 of | GCCGACAAGTTCAAGGGC | GGACTCTACTCCCTCAGC |
| | ATCTGCAACTACGCCGACAAGTTCA | GLYSLSSVVTVPSSSLGTQTYI | SEQ ID | CGGTTCACCATCTCCGTG | AGCGTGGTGACCGTGCCC |
| | AGGGCCGGTTCACCATCTCCGTGGA | CNVNHKPSNTKVDKKVEPKSCD | NO: 316) | GACAACTCCAAGTCCACC | TCCAGCAGCTTGGGCACC |
| | CAACTCCAAGTCCACCGCCTACCTC | KTHTCPPCPAPELLGGPSVFLF | [SEQ ID | GCCTACCTCCAGATGAAC | CAGACCTACATCTGCAAC |
| | CAGATGAACTCCCTGAGAGCCGAGG | PPKPKDTLMISRTPEVTCVVVD | NO: 319] | TCCCTGAGAGCCGAGGAC | GTGAATCACAAGCCCAGC |
| | ACACCGCCGTGTACTACTGCGCCAG | VSHEDPEVKFNWYVDGVEVHNA | | ACCGCCGTGTACTACTGC | AACACCAAGGTGGACAAG |
| | AGAGGACGGCTACGACGCTTGGTTT | KTKPREEQYNSTYRVVSVLTVL | | GCCAGAGAGGACGGCTAC | AAAGTTGAGCCCAAATCT |
| | GCTTACTGGGGCCAGGGCACCCTGG | HQDWLNGKEYKCKVSNKALPAP | | GACGCTTGGTTTGCTTAC | TGTGACAAAACTCACACA |
| | TCACCGTGTCATCTGCATCCACCAA | IEKTISKAKGQPREPQVYTLPP | | TGGGGCCAGGGCACCCTG | TGCCCACCGTGCCCAGCA |
| | GGGCCCATCGGTCTTCCCCCTGGCA | SRDELTKNQVSLTCLVKGFYPS | | GTCACCGTGTCATCT | CCTGAACTCCTGGGGGGA |
| | CCCTCCTCCAAGAGCACCTCTGGGG | DIAVEWESNGQPENNYKTTPPV | | (Nucleotides 58 to | CCGTCAGTCTTCCTCTTC |
| | GCACAGCGGCCCTGGGCTGCCTGGT | LDSDGSFFLYSKLTVDKSRWQQ | | 414 of SEQ ID NO: | CCCCCAAAACCCAAGGAC |
| | CAAGGACTACTTCCCCGAACCGGTG | GNVFSCSVMHEALHNHYTQKSL | | 316) | ACCCTCATGATCTCCCGG |
| | ACGGTGTCGTGGAACTCAGGCGCCC | SLSPGK | | [SEQ ID NO: 320] | ACCCCTGAGGTCACATGC |
| | TGACCAGCGGCGTGCACACCTTCCC | Without leader [SEQ ID | | EVQLLESGGGLVQPGGSL | GTGGTGGTGGACGTGAGC |
| | GGCTGTCCTACAGTCCTCAGGACTC | NO: 318]: | | RLSCAASGYTFTTYWITW | CACGAAGACCCTGAGGTC |
| | TACTCCCTCAGCAGCGTGGTGACCG | EVQLLESGGGLVQPGGSLRLSC | | VRQAPGKGLEWVGDIYPG | AAGTTCAACTGGTACGTG |
| | TGCCCTCCAGCAGCTTGGGCACCCA | AASGYTFTTYWITWVRQAPGKG | | SSICNYADKFKGRFTISV | GACGGCGTGGAGGTGCAT |
| | GACCTACATCTGCAACGTGAATCAC | LEWVGDIYPGSSICNYADKFKG | | DNSKSTAYLQMNSLRAED | AATGCCAAGACAAAGCCG |
| | AAGCCCAGCAACACCAAGGTGGACA | RFTISVDNSKSTAYLQMNSLRA | | TAVYYCAREDGYDAWFAY | CGGGAGGAGCAGTACAAC |
| | AGAAAGTTGAGCCCAAATCTTGTGA | EDTAVYYCAREDGYDAWFAYWG | | WGQGTLVTVSS | AGCACGTACCGTGTGGTC |
| | CAAAACTCACACATGCCCACCGTGC | QGTLVTVSSASTKGPSVFPLAP | | [SEQ ID NO: 321] | AGCGTCCTCACCGTCCTG |
| | CCAGCACCTGAACTCCTGGGGGGAC | SSKSTSGGTAALGCLVKDYFPE | | | CACCAGGACTGGCTGAAT |
| | CGTCAGTCTTCCTCTTCCCCCCAAA | PVTVSWNSGALTSGVHTFPAVL | | | GGCAAGGAGTACAAGTGC |
| | ACCCAAGGACACCCTCATGATCTCC | QSSGLYSLSSVVTVPSSSLGTQ | | | AAGGTCTCCAACAAAGCC |
| | CGGACCCCTGAGGTCACATGCGTGG | TYICNVNHKPSNTKVDKKVEPK | | | CTCCCAGCCCCCATCGAG |
| | TGGTGGACGTGAGCCACGAAGACCC | SCDKTHTCPPCPAPELLGGPSV | | | AAAACCATCTCCAAAGCC |
| | TGAGGTCAAGTTCAACTGGTACGTG | FLFPPKPKDTLMISRTPEVTCV | | | AAAGGGCAGCCCCGAGAA |
| | GACGGCGTGGAGGTGCATAATGCCA | VVDVSHEDPEVKFNWYVDGVEV | | | CCACAGGTGTACACCCTG |
| | AGACAAAGCCGCGGGAGGAGCAGTA | HNAKTKPREEQYNSTYRVVSVL | | | CCCCCATCCCGGGATGAG |
| | CAACAGCACGTACCGTGTGGTCAGC | TVLHQDWLNGKEYKCKVSNKAL | | | CTGACCAAGAACCAGGTC |
| | GTCCTCACCGTCCTGCACCAGGACT | PAPIEKTISKAKGQPREPQVYT | | | AGCCTGACCTGCCTGGTC |
| | GGCTGAATGGCAAGGAGTACAAGTG | LPPSRDELTKNQVSLTCLVKGF | | | AAAGGCTTCTATCCCAGC |
| | CAAGGTCTCCAACAAAGCCCTCCCA | YPSDIAVEWESNGQPENNYKTT | | | GACATCGCCGTGGAGTGG |
| | GCCCCCATCGAGAAAACCATCTCCA | PPVLDSDGSFFLYSKLTVDKSR | | | GAGAGCAATGGGCAGCCG |
| | AAGCCAAAGGGCAGCCCCGAGAACC | WQQGNVFSCSVMHEALHNHYTQ | | | GAGAACAACTACAAGACC |
| | ACAGGTGTACACCCTGCCCCCATCC | KSLSLSPGK | | | ACGCCTCCCGTGCTGGAC |
| | CGGGATGAGCTGACCAAGAACCAGG | | | | TCCGACGGCTCCTTCTTC |
| | TCAGCCTGACCTGCCTGGTCAAAGG | | | | TTATATTCAAAGCTCACC |
| | CTTCTATCCCAGCGACATCGCCGTG | | | | GTGGACAAGAGCAGGTGG |
| | GAGTGGGAGAGCAATGGGCAGCCGG | | | | CAGCAGGGGAACGTCTTC |
| | AGAACAACTACAAGACCACGCCTCC | | | | TCATGCTCCGTGATGCAT |
| | CGTGCTGGACTCCGACGGCTCCTTC | | | | GAGGCTCTGCACAACCAC |
| | TTCTTATATTCAAAGCTCACCGTGG | | | | TACACGCAGAAGAGCCTC |
| | ACAAGAGCAGGTGGCAGCAGGGGAA | | | | TCCCTGTCTCCCGGG |
| | CGTCTTCTCATGCTCCGTGATGCAT | | | | (Nucleotides 415 |
| | GAGGCTCTGCACAACCACTACACGC | | | | to 1401 of SEQ ID |
| | AGAAGAGCCTCTCCCTGTCTCCCGG | | | | NO: 316) |
| | GAAATGA | | | | [SEQ ID NO: 322] |
| | Without leader [SEQ ID | | | | ASTKGPSVFPLAPSSKST |
| | NO: 1134]: | | | | SGGTAALGCLVKDYFPEP |
| | GAAGTGCAGCTGCTGGAATCTGGCG | | | | VTVSWNSGALTSGVHTFP |
| | GCGGACTGGTGCAGCCTGGCGGCTC | | | | AVLQSSGLYSLSSVVTVP |
| | TCTGAGACTGTCTTGTGCCGCCTCC | | | | SSSLGTQTYICNVNHKPS |
| | GGCTACACCTTCACCACCTACTGGA | | | | NTKVDKKVEPKSCDKTHT |
| | TCACCTGGGTCCGACAGGCTCCCGG | | | | CPPCPAPELLGGPSVFLF |
| | CAAGGGACTGGAATGGGTCGGAGAC | | | | PPKPKDTLMISRTPEVTC |
| | ATCTACCCCGGCTCCTCCATCTGCA | | | | VVVDVSHEDPEVKFNWYV |
| | ACTACGCCGACAAGTTCAAGGGCCG | | | | DGVEVHNAKTKPREEQYN |
| | GTTCACCATCTCCGTGGACAACTCC | | | | STYRVVSVLTVLHQDWLN |
| | AAGTCCACCGCCTACCTCCAGATGA | | | | GKEYKCKVSNKALPAPIE |
| | ACTCCCTGAGAGCCGAGGACACCGC | | | | KTISKAKGQPREPQVYTL |
| | CGTGTACTACTGCGCCAGAGAGGAC | | | | PPSRDELTKNQVSLTCLV |
| | GGCTACGACGCTTGGTTTGCTTACT | | | | KGFYPSDIAVEWESNGQP |
| | GGGGCCAGGGCACCCTGGTCACCGT | | | | ENNYKTTPPVLDSDGSFF |
| | GTCATCTGCATCCACCAAGGGCCCA | | | | LYSKLTVDKSRWQQGNVF |
| | TCGGTCTTCCCCCTGGCACCCTCCT | | | | SCSVMHEALHNHYTQKSL |
| | CCAAGAGCACCTCTGGGGGCACAGC | | | | SLSPGK |
| | GGCCCTGGGCTGCCTGGTCAAGGAC | | | | [SEQ ID NO: 323] |
| | TACTTCCCCGAACCGGTGACGGTGT | | | | |
| | CGTGGAACTCAGGCGCCCTGACCAG | | | | |
| | CGGCGTGCACACCTTCCCGGCTGTC | | | | |
| | CTACAGTCCTCAGGACTCTACTCCC | | | | |
| | TCAGCAGCGTGGTGACCGTGCCCTC | | | | |
| | CAGCAGCTTGGGCACCCAGACCTAC | | | | |
| | ATCTGCAACGTGAATCACAAGCCCA | | | | |
| | GCAACACCAAGGTGGACAAGAAAGT | | | | |
| | TGAGCCCAAATCTTGTGACAAAACT | | | | |
| | CACACATGCCCACCGTGCCCAGCAC | | | | |
| | CTGAACTCCTGGGGGGACCGTCAGT | | | | |
| | CTTCCTCTTCCCCCCAAAACCCAAG | | | | |
| | GACACCCTCATGATCTCCCGGACCC | | | | |
| | CTGAGGTCACATGCGTGGTGGTGGA | | | | |
| | CGTGAGCCACGAAGACCCTGAGGTC | | | | |
| | AAGTTCAACTGGTACGTGGACGGCG | | | | |
| | TGGAGGTGCATAATGCCAAGACAAA | | | | |
| | GCCGCGGGAGGAGCAGTACAACAGC | | | | |
| | ACGTACCGTGTGGTCAGCGTCCTCA | | | | |
| | CCGTCCTGCACCAGGACTGGCTGAA | | | | |
| | TGGCAAGGAGTACAAGTGCAAGGTC | | | | |
| | TCCAACAAAGCCCTCCCAGCCCCCA | | | | |
| | TCGAGAAAACCATCTCCAAAGCCAA | | | | |
| | AGGGCAGCCCCGAGAACCACAGGTG | | | | |
| | TACACCCTGCCCCCATCCCGGGATG | | | | |
| | AGCTGACCAAGAACCAGGTCAGCCT | | | | |
| | GACCTGCCTGGTCAAAGGCTTCTAT | | | | |
| | CCCAGCGACATCGCCGTGGAGTGGG | | | | |
| | AGAGCAATGGGCAGCCGGAGAACAA | | | | |
| | CTACAAGACCACGCCTCCCGTGCTG | | | | |
| | GACTCCGACGGCTCCTTCTTCTTAT | | | | |
| | ATTCAAAGCTCACCGTGGACAAGAG | | | | |
| | CAGGTGGCAGCAGGGGAACGTCTTC | | | | |
| | TCATGCTCCGTGATGCATGAGGCTC | | | | |
| | TGCACAACCACTACACGCAGAAGAG | | | | |
| | CCTCTCCCTGTCTCCCGGGAAATGA | | | | |
| 7G6- | With leader [SEQ ID NO: | With leader [SEQ ID | ATGGGCTG | GAAGTGCAGCTGCTGGAA | ATGGGCTGGTCCTGCATC |
| HCzu15 | 324]: | NO: 326]: | GTCCTGCA | TCTGGCGGCGGACTGGTG | ATCCTGTTTCTGGTGGCC |
| | ATGGGCTGGTCCTGCATCATCCTGT | MGWSCIILFLVATATGVHSEVQ | TCATCCTG | CAGCCTGGCGGCTCTCTG | ACCGCCACCGGCGTGCAC |
| | TTCTGGTGGCCACCGCCACCGGCGT | LLESGGGLVQPGGSLRLSCAAS | TTTCTGGT | AGACTGTCTTGTGCCGCC | AGCGAAGTGCAGCTGCTG |
| | GCACAGCGAAGTGCAGCTGCTGGAA | GYTFTTYWITWVRQAPGKGLEW | GGCCACCG | TCCGGCTACACCTTCACC | GAATCTGGCGGCGGACTG |
| | TCTGGCGGCGGACTGGTGCAGCCTG | VGDIYPGSSICNYNEKFKSRFT | CCACCGGC | ACCTACTGGATCACCTGG | GTGCAGCCTGGCGGCTCT |
| | GCGGCTCTCTGAGACTGTCTTGTGC | ISVDNSKNTAYLQMNSLRAEDT | GTGCACAG | GTCCGACAGGCTCCCGGC | CTGAGACTGTCTTGTGCC |
| | CGCCTCCGGCTACACCTTCACCACC | AVYYCAREDGYDAWFAYWGQGT | C | AAGGGACTGGAATGGGTC | GCCTCCGGCTACACCTTC |
| | TACTGGATCACCTGGGTCCGACAGG | LVTVSSASTKGPSVFPLAPSSK | (Nucleo- | GGAGACATCTACCCCGGC | ACCACCTACTGGATCACC |
| | CTCCCGGCAAGGGACTGGAATGGGT | STSGGTAALGCLVKDYFPEPVT | tides 1 | TCCTCCATCTGCAACTAC | TGGGTCCGACAGGCTCCC |
| | CGGAGACATCTACCCCGGCTCCTCC | VSWNSGALTSGVHTFPAVLQSS | to 57 of | AACGAGAAGTTCAAGTCC | GGCAAGGGACTGGAATGG |
| | ATCTGCAACTACAACGAGAAGTTCA | GLYSLSSVVTVPSSSLGTQTYI | SEQ ID | CGGTTCACCATCTCCGTG | GTCGGAGACATCTACCCC |
| | AGTCCCGGTTCACCATCTCCGTGGA | CNVNHKPSNTKVDKKVEPKSCD | NO: 324) | GACAACTCCAAGAACACC | GGCTCCTCCATCTGCAAC |
| | CAACTCCAAGAACACCGCCTACCTC | KTHTCPPCPAPELLGGPSVFLF | [SEQ ID | GCCTACCTCCAGATGAAC | TACAACGAGAAGTTCAAG |
| | CAGATGAACTCCCTGAGAGCCGAGG | PPKPKDTLMISRTPEVTCVVVD | NO: 328] | TCCCTGAGAGCCGAGGAC | TCCCGGTTCACCATCTCC |
| | ACACCGCCGTGTACTACTGCGCCAG | VSHEDPEVKFNWYVDGVEVHNA | | ACCGCCGTGTACTACTGC | GTGGACAACTCCAAGAAC |
| | AGAGGACGGCTACGACGCTTGGTTT | KTKPREEQYNSTYRVVSVLTVL | | GCCAGAGAGGACGGCTAC | ACCGCCTACCTCCAGATG |
| | GCTTACTGGGGCCAGGGCACCCTGG | HQDWLNGKEYKCKVSNKALPAP | | GACGCTTGGTTTGCTTAC | AACTCCCTGAGAGCCGAG |
| | TCACCGTGTCATCTGCATCCACCAA | IEKTISKAKGQPREPQVYTLPP | | TGGGGCCAGGGCACCCTG | GACACCGCCGTGTACTAC |
| | GGGCCCATCGGTCTTCCCCCTGGCA | SRDELTKNQVSLTCLVKGFYPS | | GTCACCGTGTCATCT | TGCGCCAGAGAGGACGGC |
| | CCCTCCTCCAAGAGCACCTCTGGGG | DIAVEWESNGQPENNYKTTPPV | | (Nucleotides 58 to | TACGACGCTTGGTTTGCT |
| | GCACAGCGGCCCTGGGCTGCCTGGT | LDSDGSFFLYSKLTVDKSRWQQ | | 414 of SEQ ID NO: | TACTGGGGCCAGGGCACC |
| | CAAGGACTACTTCCCCGAACCGGTG | GNVFSCSVMHEALHNHYTQKSL | | 324) | CTGGTCACCGTGTCATCT |
| | ACGGTGTCGTGGAACTCAGGCGCCC | SLSPGK | | [SEQ ID NO: 329] | GCATCCACCAAGGGCCCA |
| | TGACCAGCGGCGTGCACACCTTCCC | Without leader [SEQ ID | | EVQLLESGGGLVQPGGSL | TCGGTCTTCCCCCTGGCA |
| | GGCTGTCCTACAGTCCTCAGGACTC | NO: 327]: | | RLSCAASGYTFTTYWITW | CCCTCCTCCAAGAGCACC |
| | TACTCCCTCAGCAGCGTGGTGACCG | EVQLLESGGGLVQPGGSLRLSC | | VRQAPGKGLEWVGDIYPG | TCTGGGGGCACAGCGGCC |
| | TGCCCTCCAGCAGCTTGGGCACCCA | AASGYTFTTYWITWVRQAPGKG | | SSICNYNEKFKSRFTISV | CTGGGCTGCCTGGTCAAG |
| | GACCTACATCTGCAACGTGAATCAC | LEWVGDIYPGSSICNYNEKFKS | | DNSKNTAYLQMNSLRAED | GACTACTTCCCCGAACCG |
| | AAGCCCAGCAACACCAAGGTGGACA | RFTISVDNSKNTAYLQMNSLRA | | TAVYYCAREDGYDAWFAY | GTGACGGTGTCGTGGAAC |
| | AGAAAGTTGAGCCCAAATCTTGTGA | EDTAVYYCAREDGYDAWFAYWG | | WGQGTLVTVSS [SEQ | TCAGGCGCCCTGACCAGC |
| | CAAAACTCACACATGCCCACCGTGC | QGTLVTVSSASTKGPSVFPLAP | | ID NO: 330] | GGCGTGCACACCTTCCCG |
| | CCAGCACCTGAACTCCTGGGGGGAC | SSKSTSGGTAALGCLVKDYFPE | | | GCTGTCCTACAGTCCTCA |
| | CGTCAGTCTTCCTCTTCCCCCCAAA | PVTVSWNSGALTSGVHTFPAVL | | | GGACTCTACTCCCTCAGC |
| | ACCCAAGGACACCCTCATGATCTCC | QSSGLYSLSSVVTVPSSSLGTQ | | | AGCGTGGTGACCGTGCCC |
| | CGGACCCCTGAGGTCACATGCGTGG | TYICNVNHKPSNTKVDKKVEPK | | | TCCAGCAGCTTGGGCACC |
| | TGGTGGACGTGAGCCACGAAGACCC | SCDKTHTCPPCPAPELLGGPSV | | | CAGACCTACATCTGCAAC |
| | TGAGGTCAAGTTCAACTGGTACGTG | FLFPPKPKDTLMISRTPEVTCV | | | GTGAATCACAAGCCCAGC |
| | GACGGCGTGGAGGTGCATAATGCCA | VVDVSHEDPEVKFNWYVDGVEV | | | AACACCAAGGTGGACAAG |
| | AGACAAAGCCGCGGGAGGAGCAGTA | HNAKTKPREEQYNSTYRVVSVL | | | AAAGTTGAGCCCAAATCT |
| | CAACAGCACGTACCGTGTGGTCAGC | TVLHQDWLNGKEYKCKVSNKAL | | | TGTGACAAAACTCACACA |
| | GTCCTCACCGTCCTGCACCAGGACT | PAPIEKTISKAKGQPREPQVYT | | | TGCCCACCGTGCCCAGCA |
| | GGCTGAATGGCAAGGAGTACAAGTG | LPPSRDELTKNQVSLTCLVKGF | | | CCTGAACTCCTGGGGGGA |
| | CAAGGTCTCCAACAAAGCCCTCCCA | YPSDIAVEWESNGQPENNYKTT | | | CCGTCAGTCTTCCTCTTC |
| | GCCCCCATCGAGAAAACCATCTCCA | PPVLDSDGSFFLYSKLTVDKSR | | | CCCCCAAAACCCAAGGAC |
| | AAGCCAAAGGGCAGCCCCGAGAACC | WQQGNVFSCSVMHEALHNHYTQ | | | ACCCTCATGATCTCCCGG |
| | ACAGGTGTACACCCTGCCCCCATCC | KSLSLSPGK | | | ACCCCTGAGGTCACATGC |
| | CGGGATGAGCTGACCAAGAACCAGG | | | | GTGGTGGTGGACGTGAGC |
| | TCAGCCTGACCTGCCTGGTCAAAGG | | | | CACGAAGACCCTGAGGTC |
| | CTTCTATCCCAGCGACATCGCCGTG | | | | AAGTTCAACTGGTACGTG |
| | GAGTGGGAGAGCAATGGGCAGCCGG | | | | GACGGCGTGGAGGTGCAT |
| | AGAACAACTACAAGACCACGCCTCC | | | | AATGCCAAGACAAAGCCG |
| | CGTGCTGGACTCCGACGGCTCCTTC | | | | CGGGAGGAGCAGTACAAC |
| | TTCTTATATTCAAAGCTCACCGTGG | | | | AGCACGTACCGTGTGGTC |
| | ACAAGAGCAGGTGGCAGCAGGGGAA | | | | AGCGTCCTCACCGTCCTG |
| | CGTCTTCTCATGCTCCGTGATGCAT | | | | CACCAGGACTGGCTGAAT |
| | GAGGCTCTGCACAACCACTACACGC | | | | GGCAAGGAGTACAAGTGC |
| | AGAAGAGCCTCTCCCTGTCTCCCGG | | | | AAGGTCTCCAACAAAGCC |
| | GAAATGA | | | | CTCCCAGCCCCCATCGAG |
| | Without leader [SEQ ID | | | | AAAACCATCTCCAAAGCC |
| | NO: 325]: | | | | AAAGGGCAGCCCCGAGAA |
| | GAAGTGCAGCTGCTGGAATCTGGCG | | | | CCACAGGTGTACACCCTG |
| | GCGGACTGGTGCAGCCTGGCGGCTC | | | | CCCCCATCCCGGGATGAG |
| | TCTGAGACTGTCTTGTGCCGCCTCC | | | | CTGACCAAGAACCAGGTC |
| | GGCTACACCTTCACCACCTACTGGA | | | | AGCCTGACCTGCCTGGTC |
| | TCACCTGGGTCCGACAGGCTCCCGG | | | | AAAGGCTTCTATCCCAGC |
| | CAAGGGACTGGAATGGGTCGGAGAC | | | | GACATCGCCGTGGAGTGG |
| | ATCTACCCCGGCTCCTCCATCTGCA | | | | GAGAGCAATGGGCAGCCG |
| | ACTACAACGAGAAGTTCAAGTCCCG | | | | GAGAACAACTACAAGACC |
| | GTTCACCATCTCCGTGGACAACTCC | | | | ACGCCTCCCGTGCTGGAC |
| | AAGAACACCGCCTACCTCCAGATGA | | | | TCCGACGGCTCCTTCTTC |
| | ACTCCCTGAGAGCCGAGGACACCGC | | | | TTATATTCAAAGCTCACC |
| | CGTGTACTACTGCGCCAGAGAGGAC | | | | GTGGACAAGAGCAGGTGG |
| | GGCTACGACGCTTGGTTTGCTTACT | | | | CAGCAGGGGAACGTCTTC |
| | GGGGCCAGGGCACCCTGGTCACCGT | | | | TCATGCTCCGTGATGCAT |
| | GTCATCTGCATCCACCAAGGGCCCA | | | | GAGGCTCTGCACAACCAC |
| | TCGGTCTTCCCCCTGGCACCCTCCT | | | | TACACGCAGAAGAGCCTC |
| | CCAAGAGCACCTCTGGGGGCACAGC | | | | TCCCTGTCTCCCGGG |
| | GGCCCTGGGCTGCCTGGTCAAGGAC | | | | (Nucleotides 415 |
| | TACTTCCCCGAACCGGTGACGGTGT | | | | to 1401 of SEQ ID |
| | CGTGGAACTCAGGCGCCCTGACCAG | | | | NO: 324) |
| | CGGCGTGCACACCTTCCCGGCTGTC | | | | [SEQ ID NO: 331] |
| | CTACAGTCCTCAGGACTCTACTCCC | | | | ASTKGPSVFPLAPSSKST |
| | TCAGCAGCGTGGTGACCGTGCCCTC | | | | SGGTAALGCLVKDYFPEP |
| | CAGCAGCTTGGGCACCCAGACCTAC | | | | VTVSWNSGALTSGVHTFP |
| | ATCTGCAACGTGAATCACAAGCCCA | | | | AVLQSSGLYSLSSVVTVP |
| | GCAACACCAAGGTGGACAAGAAAGT | | | | SSSLGTQTYICNVNHKPS |
| | TGAGCCCAAATCTTGTGACAAAACT | | | | NTKVDKKVEPKSCDKTHT |
| | CACACATGCCCACCGTGCCCAGCAC | | | | CPPCPAPELLGGPSVFLF |
| | CTGAACTCCTGGGGGGACCGTCAGT | | | | PPKPKDTLMISRTPEVTC |
| | CTTCCTCTTCCCCCCAAAACCCAAG | | | | VVVDVSHEDPEVKFNWYV |
| | GACACCCTCATGATCTCCCGGACCC | | | | DGVEVHNAKTKPREEQYN |
| | CTGAGGTCACATGCGTGGTGGTGGA | | | | STYRVVSVLTVLHQDWLN |
| | CGTGAGCCACGAAGACCCTGAGGTC | | | | GKEYKCKVSNKALPAPIE |
| | AAGTTCAACTGGTACGTGGACGGCG | | | | KTISKAKGQPREPQVYTL |
| | TGGAGGTGCATAATGCCAAGACAAA | | | | PPSRDELTKNQVSLTCLV |
| | GCCGCGGGAGGAGCAGTACAACAGC | | | | KGFYPSDIAVEWESNGQP |
| | ACGTACCGTGTGGTCAGCGTCCTCA | | | | ENNYKTTPPVLDSDGSFF |
| | CCGTCCTGCACCAGGACTGGCTGAA | | | | LYSKLTVDKSRWQQGNVF |
| | TGGCAAGGAGTACAAGTGCAAGGTC | | | | SCSVMHEALHNHYTQKSL |
| | TCCAACAAAGCCCTCCCAGCCCCCA | | | | SLSPGK |
| | TCGAGAAAACCATCTCCAAAGCCAA | | | | [SEQ ID NO: 332] |
| | AGGGCAGCCCCGAGAACCACAGGTG | | | | |
| | TACACCCTGCCCCCATCCCGGGATG | | | | |
| | AGCTGACCAAGAACCAGGTCAGCCT | | | | |
| | GACCTGCCTGGTCAAAGGCTTCTAT | | | | |
| | CCCAGCGACATCGCCGTGGAGTGGG | | | | |
| | AGAGCAATGGGCAGCCGGAGAACAA | | | | |
| | CTACAAGACCACGCCTCCCGTGCTG | | | | |
| | GACTCCGACGGCTCCTTCTTCTTAT | | | | |
| | ATTCAAAGCTCACCGTGGACAAGAG | | | | |
| | CAGGTGGCAGCAGGGGAACGTCTTC | | | | |
| | TCATGCTCCGTGATGCATGAGGCTC | | | | |
| | TGCACAACCACTACACGCAGAAGAG | | | | |
| | CCTCTCCCTGTCTCCCGGGAAATGA | | | | |
| 7G6- | With leader [SEQ ID NO: | With leader [SEQ ID | ATGGGCTG | GAAGTGCAGCTGCTGGAA | GCATCCACCAAGGGCCCA |
| HCzu16 | 333]: | NO: 335]: | GTCCTGCA | TCTGGCGGCGGACTGGTG | TCGGTCTTCCCCCTGGCA |
| | ATGGGCTGGTCCTGCATCATCCTGT | MGWSCIILFLVATATGVHSEVQ | TCATCCTG | CAGCCTGGCGGCTCTCTG | CCCTCCTCCAAGAGCACC |
| | TTCTGGTGGCCACCGCCACCGGCGT | LLESGGGLVQPGGSLRLSCAAS | TTTCTGGT | AGACTGTCTTGTGCCGCC | TCTGGGGGCACAGCGGCC |
| | GCACAGCGAAGTGCAGCTGCTGGAA | GYTFTTYWITWVRQAPGKGLEW | GGCCACCG | TCCGGCTACACCTTCACC | CTGGGCTGCCTGGTCAAG |
| | TCTGGCGGCGGACTGGTGCAGCCTG | VSDIYPGSSICNYNEKFKSRFT | CCACCGGC | ACCTACTGGATCACCTGG | GACTACTTCCCCGAACCG |
| | GCGGCTCTCTGAGACTGTCTTGTGC | ISVDNSKNTAYLQMNSLRAEDT | GTGCACAG | GTCCGACAGGCTCCCGGC | GTGACGGTGTCGTGGAAC |
| | CGCCTCCGGCTACACCTTCACCACC | AVYYCAREDGYDAWFAYWGQGT | C | AAGGGACTGGAATGGGTC | TCAGGCGCCCTGACCAGC |
| | TACTGGATCACCTGGGTCCGACAGG | LVTVSSASTKGPSVFPLAPSSK | (Nucleo- | TCCGACATCTACCCCGGC | GGCGTGCACACCTTCCCG |
| | CTCCCGGCAAGGGACTGGAATGGGT | STSGGTAALGCLVKDYFPEPVT | tides 1 | TCCTCCATCTGCAACTAC | GCTGTCCTACAGTCCTCA |
| | CTCCGACATCTACCCCGGCTCCTCC | VSWNSGALTSGVHTFPAVLQSS | to 57 of | AACGAGAAGTTCAAGTCC | GGACTCTACTCCCTCAGC |
| | ATCTGCAACTACAACGAGAAGTTCA | GLYSLSSVVTVPSSSLGTQTYI | SEQ ID | CGGTTCACCATCTCCGTG | AGCGTGGTGACCGTGCCC |
| | AGTCCCGGTTCACCATCTCCGTGGA | CNVNHKPSNTKVDKKVEPKSCD | NO: 333) | GACAACTCCAAGAACACC | TCCAGCAGCTTGGGCACC |
| | CAACTCCAAGAACACCGCCTACCTC | KTHTCPPCPAPELLGGPSVFLF | [SEQ ID | GCCTACCTCCAGATGAAC | CAGACCTACATCTGCAAC |
| | CAGATGAACTCCCTGAGAGCCGAGG | PPKPKDTLMISRTPEVTCVVVD | NO: 337] | TCCCTGAGAGCCGAGGAC | GTGAATCACAAGCCCAGC |
| | ACACCGCCGTGTACTACTGCGCCAG | VSHEDPEVKFNWYVDGVEVHNA | | ACCGCCGTGTACTACTGC | AACACCAAGGTGGACAAG |
| | AGAGGACGGCTACGACGCTTGGTTT | KTKPREEQYNSTYRVVSVLTVL | | GCCAGAGAGGACGGCTAC | AAAGTTGAGCCCAAATCT |
| | GCTTACTGGGGCCAGGGCACCCTGG | HQDWLNGKEYKCKVSNKALPAP | | GACGCTTGGTTTGCTTAC | TGTGACAAAACTCACACA |
| | TCACCGTGTCATCTGCATCCACCAA | IEKTISKAKGQPREPQVYTLPP | | TGGGGCCAGGGCACCCTG | TGCCCACCGTGCCCAGCA |
| | GGGCCCATCGGTCTTCCCCCTGGCA | SRDELTKNQVSLTCLVKGFYPS | | GTCACCGTGTCATCT | CCTGAACTCCTGGGGGGA |
| | CCCTCCTCCAAGAGCACCTCTGGGG | DIAVEWESNGQPENNYKTTPPV | | (Nucleotides 58 to | CCGTCAGTCTTCCTCTTC |
| | GCACAGCGGCCCTGGGCTGCCTGGT | LDSDGSFFLYSKLTVDKSRWQQ | | 414 of SEQ ID NO: | CCCCCAAAACCCAAGGAC |
| | CAAGGACTACTTCCCCGAACCGGTG | GNVFSCSVMHEALHNHYTQKSL | | 333) | ACCCTCATGATCTCCCGG |
| | ACGGTGTCGTGGAACTCAGGCGCCC | SLSPGK | | [SEQ ID NO: 338] | ACCCCTGAGGTCACATGC |
| | TGACCAGCGGCGTGCACACCTTCCC | Without leader [SEQ ID | | EVQLLESGGGLVQPGGSL | GTGGTGGTGGACGTGAGC |
| | GGCTGTCCTACAGTCCTCAGGACTC | NO: 336]: | | RLSCAASGYTFTTYWITW | CACGAAGACCCTGAGGTC |
| | TACTCCCTCAGCAGCGTGGTGACCG | EVQLLESGGGLVQPGGSLRLSC | | VRQAPGKGLEWVSDIYPG | AAGTTCAACTGGTACGTG |
| | TGCCCTCCAGCAGCTTGGGCACCCA | AASGYTFTTYWITWVRQAPGKG | | SSICNYNEKFKSRFTISV | GACGGCGTGGAGGTGCAT |
| | GACCTACATCTGCAACGTGAATCAC | LEWVSDIYPGSSICNYNEKFKS | | DNSKNTAYLQMNSLRAED | AATGCCAAGACAAAGCCG |
| | AAGCCCAGCAACACCAAGGTGGACA | RFTISVDNSKNTAYLQMNSLRA | | TAVYYCAREDGYDAWFAY | CGGGAGGAGCAGTACAAC |
| | AGAAAGTTGAGCCCAAATCTTGTGA | EDTAVYYCAREDGYDAWFAYWG | | WGQGTLVTVSS | AGCACGTACCGTGTGGTC |
| | CAAAACTCACACATGCCCACCGTGC | QGTLVTVSSASTKGPSVFPLAP | | [SEQ ID NO: 339] | AGCGTCCTCACCGTCCTG |
| | CCAGCACCTGAACTCCTGGGGGGAC | SSKSTSGGTAALGCLVKDYFPE | | | CACCAGGACTGGCTGAAT |
| | CGTCAGTCTTCCTCTTCCCCCCAAA | PVTVSWNSGALTSGVHTFPAVL | | | GGCAAGGAGTACAAGTGC |
| | ACCCAAGGACACCCTCATGATCTCC | QSSGLYSLSSVVTVPSSSLGTQ | | | AAGGTCTCCAACAAAGCC |
| | CGGACCCCTGAGGTCACATGCGTGG | TYICNVNHKPSNTKVDKKVEPK | | | CTCCCAGCCCCCATCGAG |
| | TGGTGGACGTGAGCCACGAAGACCC | SCDKTHTCPPCPAPELLGGPSV | | | AAAACCATCTCCAAAGCC |
| | TGAGGTCAAGTTCAACTGGTACGTG | FLFPPKPKDTLMISRTPEVTCV | | | AAAGGGCAGCCCCGAGAA |
| | GACGGCGTGGAGGTGCATAATGCCA | VVDVSHEDPEVKFNWYVDGVEV | | | CCACAGGTGTACACCCTG |
| | AGACAAAGCCGCGGGAGGAGCAGTA | HNAKTKPREEQYNSTYRVVSVL | | | CCCCCATCCCGGGATGAG |
| | CAACAGCACGTACCGTGTGGTCAGC | TVLHQDWLNGKEYKCKVSNKAL | | | CTGACCAAGAACCAGGTC |
| | GTCCTCACCGTCCTGCACCAGGACT | PAPIEKTISKAKGQPREPQVYT | | | AGCCTGACCTGCCTGGTC |
| | GGCTGAATGGCAAGGAGTACAAGTG | LPPSRDELTKNQVSLTCLVKGF | | | AAAGGCTTCTATCCCAGC |
| | CAAGGTCTCCAACAAAGCCCTCCCA | YPSDIAVEWESNGQPENNYKTT | | | GACATCGCCGTGGAGTGG |
| | GCCCCCATCGAGAAAACCATCTCCA | PPVLDSDGSFFLYSKLTVDKSR | | | GAGAGCAATGGGCAGCCG |
| | AAGCCAAAGGGCAGCCCCGAGAACC | WQQGNVFSCSVMHEALHNHYTQ | | | GAGAACAACTACAAGACC |
| | ACAGGTGTACACCCTGCCCCCATCC | KSLSLSPGK | | | ACGCCTCCCGTGCTGGAC |
| | CGGGATGAGCTGACCAAGAACCAGG | | | | TCCGACGGCTCCTTCTTC |
| | TCAGCCTGACCTGCCTGGTCAAAGG | | | | TTATATTCAAAGCTCACC |
| | CTTCTATCCCAGCGACATCGCCGTG | | | | GTGGACAAGAGCAGGTGG |
| | GAGTGGGAGAGCAATGGGCAGCCGG | | | | CAGCAGGGGAACGTCTTC |
| | AGAACAACTACAAGACCACGCCTCC | | | | TCATGCTCCGTGATGCAT |
| | CGTGCTGGACTCCGACGGCTCCTTC | | | | GAGGCTCTGCACAACCAC |
| | TTCTTATATTCAAAGCTCACCGTGG | | | | TACACGCAGAAGAGCCTC |
| | ACAAGAGCAGGTGGCAGCAGGGGAA | | | | TCCCTGTCTCCCGGGAAA |
| | CGTCTTCTCATGCTCCGTGATGCAT | | | | TGA |
| | GAGGCTCTGCACAACCACTACACGC | | | | (Nucleotides 415 |
| | AGAAGAGCCTCTCCCTGTCTCCCGG | | | | to 1401 of SEQ ID |
| | GAAATGA | | | | NO: 333) |
| | Without leader [SEQ ID | | | | [SEQ ID NO: 340] |
| | NO: 334]: | | | | ASTKGPSVFPLAPSSKST |
| | GAAGTGCAGCTGCTGGAATCTGGCG | | | | SGGTAALGCLVKDYFPEP |
| | GCGGACTGGTGCAGCCTGGCGGCTC | | | | VTVSWNSGALTSGVHTFP |
| | TCTGAGACTGTCTTGTGCCGCCTCC | | | | AVLQSSGLYSLSSVVTVP |
| | GGCTACACCTTCACCACCTACTGGA | | | | SSSLGTQTYICNVNHKPS |
| | TCACCTGGGTCCGACAGGCTCCCGG | | | | NTKVDKKVEPKSCDKTHT |
| | CAAGGGACTGGAATGGGTCTCCGAC | | | | CPPCPAPELLGGPSVFLF |
| | ATCTACCCCGGCTCCTCCATCTGCA | | | | PPKPKDTLMISRTPEVTC |
| | ACTACAACGAGAAGTTCAAGTCCCG | | | | VVVDVSHEDPEVKFNWYV |
| | GTTCACCATCTCCGTGGACAACTCC | | | | DGVEVHNAKTKPREEQYN |
| | AAGAACACCGCCTACCTCCAGATGA | | | | STYRVVSVLTVLHQDWLN |
| | ACTCCCTGAGAGCCGAGGACACCGC | | | | GKEYKCKVSNKALPAPIE |
| | CGTGTACTACTGCGCCAGAGAGGAC | | | | KTISKAKGQPREPQVYTL |
| | GGCTACGACGCTTGGTTTGCTTACT | | | | PPSRDELTKNQVSLTCLV |
| | GGGGCCAGGGCACCCTGGTCACCGT | | | | KGFYPSDIAVEWESNGQP |
| | GTCATCTGCATCCACCAAGGGCCCA | | | | ENNYKTTPPVLDSDGSFF |
| | TCGGTCTTCCCCCTGGCACCCTCCT | | | | LYSKLTVDKSRWQQGNVF |
| | CCAAGAGCACCTCTGGGGGCACAGC | | | | SCSVMHEALHNHYTQKSL |
| | GGCCCTGGGCTGCCTGGTCAAGGAC | | | | SLSPGK |
| | TACTTCCCCGAACCGGTGACGGTGT | | | | [SEQ ID NO: 341] |
| | CGTGGAACTCAGGCGCCCTGACCAG | | | | |
| | CGGCGTGCACACCTTCCCGGCTGTC | | | | |
| | CTACAGTCCTCAGGACTCTACTCCC | | | | |
| | TCAGCAGCGTGGTGACCGTGCCCTC | | | | |
| | CAGCAGCTTGGGCACCCAGACCTAC | | | | |
| | ATCTGCAACGTGAATCACAAGCCCA | | | | |
| | GCAACACCAAGGTGGACAAGAAAGT | | | | |
| | TGAGCCCAAATCTTGTGACAAAACT | | | | |
| | CACACATGCCCACCGTGCCCAGCAC | | | | |
| | CTGAACTCCTGGGGGGACCGTCAGT | | | | |
| | CTTCCTCTTCCCCCCAAAACCCAAG | | | | |
| | GACACCCTCATGATCTCCCGGACCC | | | | |
| | CTGAGGTCACATGCGTGGTGGTGGA | | | | |
| | CGTGAGCCACGAAGACCCTGAGGTC | | | | |
| | AAGTTCAACTGGTACGTGGACGGCG | | | | |
| | TGGAGGTGCATAATGCCAAGACAAA | | | | |
| | GCCGCGGGAGGAGCAGTACAACAGC | | | | |
| | ACGTACCGTGTGGTCAGCGTCCTCA | | | | |
| | CCGTCCTGCACCAGGACTGGCTGAA | | | | |
| | TGGCAAGGAGTACAAGTGCAAGGTC | | | | |
| | TCCAACAAAGCCCTCCCAGCCCCCA | | | | |
| | TCGAGAAAACCATCTCCAAAGCCAA | | | | |
| | AGGGCAGCCCCGAGAACCACAGGTG | | | | |
| | TACACCCTGCCCCCATCCCGGGATG | | | | |
| | AGCTGACCAAGAACCAGGTCAGCCT | | | | |
| | GACCTGCCTGGTCAAAGGCTTCTAT | | | | |
| | CCCAGCGACATCGCCGTGGAGTGGG | | | | |
| | AGAGCAATGGGCAGCCGGAGAACAA | | | | |
| | CTACAAGACCACGCCTCCCGTGCTG | | | | |
| | GACTCCGACGGCTCCTTCTTCTTAT | | | | |
| | ATTCAAAGCTCACCGTGGACAAGAG | | | | |
| | CAGGTGGCAGCAGGGGAACGTCTTC | | | | |
| | TCATGCTCCGTGATGCATGAGGCTC | | | | |
| | TGCACAACCACTACACGCAGAAGAG | | | | |
| | CCTCTCCCTGTCTCCCGGGAAATGA | | | | |
| 7G6- | With leader [SEQ ID NO: | With leader [SEQ ID | ATGGGCTG | GAAGTGCAGCTGCTGGAA | GCATCCACCAAGGGCCCA |
| HCzu17 | 342]: | NO: 344]: | GTCCTGCA | TCTGGCGGCGGACTGGTG | TCGGTCTTCCCCCTGGCA |
| | ATGGGCTGGTCCTGCATCATCCTGT | MGWSCIILFLVATATGVHSEVQ | TCATCCTG | CAGCCTGGCGGCTCTCTG | CCCTCCTCCAAGAGCACC |
| | TTCTGGTGGCCACCGCCACCGGCGT | LLESGGGLVQPGGSLRLSCAAS | TTTCTGGT | AGACTGTCTTGTGCCGCC | TCTGGGGGCACAGCGGCC |
| | GCACAGCGAAGTGCAGCTGCTGGAA | GYTFTTYWITWVRQAPGKGLEW | GGCCACCG | TCCGGCTACACCTTCACC | CTGGGCTGCCTGGTCAAG |
| | TCTGGCGGCGGACTGGTGCAGCCTG | VSDIYPGSSICNYNEKFKSRFT | CCACCGGC | ACCTACTGGATCACCTGG | GACTACTTCCCCGAACCG |
| | GCGGCTCTCTGAGACTGTCTTGTGC | ISVDNSKNTLYLQMNSLRAEDT | GTGCACAG | GTCCGACAGGCTCCCGGC | GTGACGGTGTCGTGGAAC |
| | CGCCTCCGGCTACACCTTCACCACC | AVYYCAREDGYDAWFAYWGQGT | C | AAGGGACTGGAATGGGTC | TCAGGCGCCCTGACCAGC |
| | TACTGGATCACCTGGGTCCGACAGG | LVTVSSASTKGPSVFPLAPSSK | (Nucleo- | TCCGACATCTACCCCGGC | GGCGTGCACACCTTCCCG |
| | CTCCCGGCAAGGGACTGGAATGGGT | STSGGTAALGCLVKDYFPEPVT | tides 1 | TCCTCCATCTGCAACTAC | GCTGTCCTACAGTCCTCA |
| | CTCCGACATCTACCCCGGCTCCTCC | VSWNSGALTSGVHTFPAVLQSS | to 57 of | AACGAGAAGTTCAAGTCC | GGACTCTACTCCCTCAGC |
| | ATCTGCAACTACAACGAGAAGTTCA | GLYSLSSVVTVPSSSLGTQTYI | SEQ ID | CGGTTCACCATCTCCGTG | AGCGTGGTGACCGTGCCC |
| | AGTCCCGGTTCACCATCTCCGTGGA | CNVNHKPSNTKVDKKVEPKSCD | NO: 342) | GACAACTCCAAGAACACC | TCCAGCAGCTTGGGCACC |
| | CAACTCCAAGAACACCCTGTACCTC | KTHTCPPCPAPELLGGPSVFLF | [SEQ ID | CTGTACCTCCAGATGAAC | CAGACCTACATCTGCAAC |
| | CAGATGAACTCCCTGAGAGCCGAGG | PPKPKDTLMISRTPEVTCVVVD | NO: 346] | TCCCTGAGAGCCGAGGAC | GTGAATCACAAGCCCAGC |
| | ACACCGCCGTGTACTACTGCGCCAG | VSHEDPEVKFNWYVDGVEVHNA | | ACCGCCGTGTACTACTGC | AACACCAAGGTGGACAAG |
| | AGAGGACGGCTACGACGCTTGGTTT | KTKPREEQYNSTYRVVSVLTVL | | GCCAGAGAGGACGGCTAC | AAAGTTGAGCCCAAATCT |
| | GCTTACTGGGGCCAGGGCACCCTGG | HQDWLNGKEYKCKVSNKALPAP | | GACGCTTGGTTTGCTTAC | TGTGACAAAACTCACACA |
| | TCACCGTGTCATCTGCATCCACCAA | IEKTISKAKGQPREPQVYTLPP | | TGGGGCCAGGGCACCCTG | TGCCCACCGTGCCCAGCA |
| | GGGCCCATCGGTCTTCCCCCTGGCA | SRDELTKNQVSLTCLVKGFYPS | | GTCACCGTGTCATCT | CCTGAACTCCTGGGGGGA |
| | CCCTCCTCCAAGAGCACCTCTGGGG | DIAVEWESNGQPENNYKTTPPV | | (Nucleotides 58 to | CCGTCAGTCTTCCTCTTC |
| | GCACAGCGGCCCTGGGCTGCCTGGT | LDSDGSFFLYSKLTVDKSRWQQ | | 414 of SEQ ID NO: | CCCCCAAAACCCAAGGAC |
| | CAAGGACTACTTCCCCGAACCGGTG | GNVFSCSVMHEALHNHYTQKSL | | 342) | ACCCTCATGATCTCCCGG |
| | ACGGTGTCGTGGAACTCAGGCGCCC | SLSPGK | | [SEQ ID NO: 347] | ACCCCTGAGGTCACATGC |
| | TGACCAGCGGCGTGCACACCTTCCC | Without leader [SEQ ID | | EVQLLESGGGLVQPGGSL | GTGGTGGTGGACGTGAGC |
| | GGCTGTCCTACAGTCCTCAGGACTC | NO: 345]: | | RLSCAASGYTFTTYWITW | CACGAAGACCCTGAGGTC |
| | TACTCCCTCAGCAGCGTGGTGACCG | EVQLLESGGGLVQPGGSLRLSC | | VRQAPGKGLEWVSDIYPG | AAGTTCAACTGGTACGTG |
| | TGCCCTCCAGCAGCTTGGGCACCCA | AASGYTFTTYWITWVRQAPGKG | | SSICNYNEKFKSRFTISV | GACGGCGTGGAGGTGCAT |
| | GACCTACATCTGCAACGTGAATCAC | LEWVSDIYPGSSICNYNEKFKS | | DNSKNTLYLQMNSLRAED | AATGCCAAGACAAAGCCG |
| | AAGCCCAGCAACACCAAGGTGGACA | RFTISVDNSKNTLYLQMNSLRA | | TAVYYCAREDGYDAWFAY | CGGGAGGAGCAGTACAAC |
| | AGAAAGTTGAGCCCAAATCTTGTGA | EDTAVYYCAREDGYDAWFAYWG | | WGQGTLVTVSS | AGCACGTACCGTGTGGTC |
| | CAAAACTCACACATGCCCACCGTGC | QGTLVTVSSASTKGPSVFPLAP | | [SEQ ID NO: 348] | AGCGTCCTCACCGTCCTG |
| | CCAGCACCTGAACTCCTGGGGGGAC | SSKSTSGGTAALGCLVKDYFPE | | | CACCAGGACTGGCTGAAT |
| | CGTCAGTCTTCCTCTTCCCCCCAAA | PVTVSWNSGALTSGVHTFPAVL | | | GGCAAGGAGTACAAGTGC |
| | ACCCAAGGACACCCTCATGATCTCC | QSSGLYSLSSVVTVPSSSLGTQ | | | AAGGTCTCCAACAAAGCC |
| | CGGACCCCTGAGGTCACATGCGTGG | TYICNVNHKPSNTKVDKKVEPK | | | CTCCCAGCCCCCATCGAG |
| | TGGTGGACGTGAGCCACGAAGACCC | SCDKTHTCPPCPAPELLGGPSV | | | AAAACCATCTCCAAAGCC |
| | TGAGGTCAAGTTCAACTGGTACGTG | FLFPPKPKDTLMISRTPEVTCV | | | AAAGGGCAGCCCCGAGAA |
| | GACGGCGTGGAGGTGCATAATGCCA | VVDVSHEDPEVKFNWYVDGVEV | | | CCACAGGTGTACACCCTG |
| | AGACAAAGCCGCGGGAGGAGCAGTA | HNAKTKPREEQYNSTYRVVSVL | | | CCCCCATCCCGGGATGAG |
| | CAACAGCACGTACCGTGTGGTCAGC | TVLHQDWLNGKEYKCKVSNKAL | | | CTGACCAAGAACCAGGTC |
| | GTCCTCACCGTCCTGCACCAGGACT | PAPIEKTISKAKGQPREPQVYT | | | AGCCTGACCTGCCTGGTC |
| | GGCTGAATGGCAAGGAGTACAAGTG | LPPSRDELTKNQVSLTCLVKGF | | | AAAGGCTTCTATCCCAGC |
| | CAAGGTCTCCAACAAAGCCCTCCCA | YPSDIAVEWESNGQPENNYKTT | | | GACATCGCCGTGGAGTGG |
| | GCCCCCATCGAGAAAACCATCTCCA | PPVLDSDGSFFLYSKLTVDKSR | | | GAGAGCAATGGGCAGCCG |
| | AAGCCAAAGGGCAGCCCCGAGAACC | WQQGNVFSCSVMHEALHNHYTQ | | | GAGAACAACTACAAGACC |
| | ACAGGTGTACACCCTGCCCCCATCC | KSLSLSPGK | | | ACGCCTCCCGTGCTGGAC |
| | CGGGATGAGCTGACCAAGAACCAGG | | | | TCCGACGGCTCCTTCTTC |
| | TCAGCCTGACCTGCCTGGTCAAAGG | | | | TTATATTCAAAGCTCACC |
| | CTTCTATCCCAGCGACATCGCCGTG | | | | GTGGACAAGAGCAGGTGG |
| | GAGTGGGAGAGCAATGGGCAGCCGG | | | | CAGCAGGGGAACGTCTTC |
| | AGAACAACTACAAGACCACGCCTCC | | | | TCATGCTCCGTGATGCAT |
| | CGTGCTGGACTCCGACGGCTCCTTC | | | | GAGGCTCTGCACAACCAC |
| | TTCTTATATTCAAAGCTCACCGTGG | | | | TACACGCAGAAGAGCCTC |
| | ACAAGAGCAGGTGGCAGCAGGGGAA | | | | TCCCTGTCTCCCGGG |
| | CGTCTTCTCATGCTCCGTGATGCAT | | | | (Nucleotides 415 |
| | GAGGCTCTGCACAACCACTACACGC | | | | to 1401 of SEQ ID |
| | AGAAGAGCCTCTCCCTGTCTCCCGG | | | | NO: 342) |
| | GAAATGA | | | | [SEQ ID NO: 349] |
| | Without leader [SEQ ID | | | | ASTKGPSVFPLAPSSKST |
| | NO: 343}: | | | | SGGTAALGCLVKDYFPEP |
| | GAAGTGCAGCTGCTGGAATCTGGCG | | | | VTVSWNSGALTSGVHTFP |
| | GCGGACTGGTGCAGCCTGGCGGCTC | | | | AVLQSSGLYSLSSVVTVP |
| | TCTGAGACTGTCTTGTGCCGCCTCC | | | | SSSLGTQTYICNVNHKPS |
| | GGCTACACCTTCACCACCTACTGGA | | | | NTKVDKKVEPKSCDKTHT |
| | TCACCTGGGTCCGACAGGCTCCCGG | | | | CPPCPAPELLGGPSVFLF |
| | CAAGGGACTGGAATGGGTCTCCGAC | | | | PPKPKDTLMISRTPEVTC |
| | ATCTACCCCGGCTCCTCCATCTGCA | | | | VVVDVSHEDPEVKFNWYV |
| | ACTACAACGAGAAGTTCAAGTCCCG | | | | DGVEVHNAKTKPREEQYN |
| | GTTCACCATCTCCGTGGACAACTCC | | | | STYRVVSVLTVLHQDWLN |
| | AAGAACACCCTGTACCTCCAGATGA | | | | GKEYKCKVSNKALPAPIE |
| | ACTCCCTGAGAGCCGAGGACACCGC | | | | KTISKAKGQPREPQVYTL |
| | CGTGTACTACTGCGCCAGAGAGGAC | | | | PPSRDELTKNQVSLTCLV |
| | GGCTACGACGCTTGGTTTGCTTACT | | | | KGFYPSDIAVEWESNGQP |
| | GGGGCCAGGGCACCCTGGTCACCGT | | | | ENNYKTTPPVLDSDGSFF |
| | GTCATCTGCATCCACCAAGGGCCCA | | | | LYSKLTVDKSRWQQGNVF |
| | TCGGTCTTCCCCCTGGCACCCTCCT | | | | SCSVMHEALHNHYTQKSL |
| | CCAAGAGCACCTCTGGGGGCACAGC | | | | SLSPGK |
| | GGCCCTGGGCTGCCTGGTCAAGGAC | | | | [SEQ ID NO: 350] |
| | TACTTCCCCGAACCGGTGACGGTGT | | | | |
| | CGTGGAACTCAGGCGCCCTGACCAG | | | | |
| | CGGCGTGCACACCTTCCCGGCTGTC | | | | |
| | CTACAGTCCTCAGGACTCTACTCCC | | | | |
| | TCAGCAGCGTGGTGACCGTGCCCTC | | | | |
| | CAGCAGCTTGGGCACCCAGACCTAC | | | | |
| | ATCTGCAACGTGAATCACAAGCCCA | | | | |
| | GCAACACCAAGGTGGACAAGAAAGT | | | | |
| | TGAGCCCAAATCTTGTGACAAAACT | | | | |
| | CACACATGCCCACCGTGCCCAGCAC | | | | |
| | CTGAACTCCTGGGGGGACCGTCAGT | | | | |
| | CTTCCTCTTCCCCCCAAAACCCAAG | | | | |
| | GACACCCTCATGATCTCCCGGACCC | | | | |
| | CTGAGGTCACATGCGTGGTGGTGGA | | | | |
| | CGTGAGCCACGAAGACCCTGAGGTC | | | | |
| | AAGTTCAACTGGTACGTGGACGGCG | | | | |
| | TGGAGGTGCATAATGCCAAGACAAA | | | | |
| | GCCGCGGGAGGAGCAGTACAACAGC | | | | |
| | ACGTACCGTGTGGTCAGCGTCCTCA | | | | |
| | CCGTCCTGCACCAGGACTGGCTGAA | | | | |
| | TGGCAAGGAGTACAAGTGCAAGGTC | | | | |
| | TCCAACAAAGCCCTCCCAGCCCCCA | | | | |
| | TCGAGAAAACCATCTCCAAAGCCAA | | | | |
| | AGGGCAGCCCCGAGAACCACAGGTG | | | | |
| | TACACCCTGCCCCCATCCCGGGATG | | | | |
| | AGCTGACCAAGAACCAGGTCAGCCT | | | | |
| | GACCTGCCTGGTCAAAGGCTTCTAT | | | | |
| | CCCAGCGACATCGCCGTGGAGTGGG | | | | |
| | AGAGCAATGGGCAGCCGGAGAACAA | | | | |
| | CTACAAGACCACGCCTCCCGTGCTG | | | | |
| | GACTCCGACGGCTCCTTCTTCTTAT | | | | |
| | ATTCAAAGCTCACCGTGGACAAGAG | | | | |
| | CAGGTGGCAGCAGGGGAACGTCTTC | | | | |
| | TCATGCTCCGTGATGCATGAGGCTC | | | | |
| | TGCACAACCACTACACGCAGAAGAG | | | | |
| | CCTCTCCCTGTCTCCCGGGAAATGA | | | | |
| 7G6- | With leader [SEQ ID NO: | With leader [SEQ ID | ATGGGCTG | GAAGTGCAGCTGCTGGAA | GCATCCACCAAGGGCCCA |
| HCzu18 | 351]: | NO: 353]: | GTCCTGCA | TCTGGCGGCGGACTGGTG | TCGGTCTTCCCCCTGGCA |
| | ATGGGCTGGTCCTGCATCATCCTGT | MGWSCIILFLVATATGVHSEVQ | TCATCCTG | CAGCCTGGCGGCTCTCTG | CCCTCCTCCAAGAGCACC |
| | TTCTGGTGGCCACCGCCACCGGCGT | LLESGGGLVQPGGSLRLSCAAS | TTTCTGGT | AGACTGTCTTGTGCCGCC | TCTGGGGGCACAGCGGCC |
| | GCACAGCGAAGTGCAGCTGCTGGAA | GYTFTTYWITWVRQAPGKGLEW | GGCCACCG | TCCGGCTACACCTTCACC | CTGGGCTGCCTGGTCAAG |
| | TCTGGCGGCGGACTGGTGCAGCCTG | VSDIYPGSSICNYNEKFKSRFT | CCACCGGC | ACCTACTGGATCACCTGG | GACTACTTCCCCGAACCG |
| | GCGGCTCTCTGAGACTGTCTTGTGC | ISRDNSKNTLYLQMNSLRAEDT | GTGCACAG | GTCCGACAGGCTCCCGGC | GTGACGGTGTCGTGGAAC |
| | CGCCTCCGGCTACACCTTCACCACC | AVYYCAREDGYDAWFAYWGQGT | C | AAGGGACTGGAATGGGTC | TCAGGCGCCCTGACCAGC |
| | TACTGGATCACCTGGGTCCGACAGG | LVTVSSASTKGPSVFPLAPSSK | (Nucleo- | TCCGACATCTACCCCGGC | GGCGTGCACACCTTCCCG |
| | CTCCCGGCAAGGGACTGGAATGGGT | STSGGTAALGCLVKDYFPEPVT | tides 1 | TCCTCCATCTGCAACTAC | GCTGTCCTACAGTCCTCA |
| | CTCCGACATCTACCCCGGCTCCTCC | VSWNSGALTSGVHTFPAVLQSS | to 57 of | AACGAGAAGTTCAAGTCC | GGACTCTACTCCCTCAGC |
| | ATCTGCAACTACAACGAGAAGTTCA | GLYSLSSVVTVPSSSLGTQTYI | SEQ ID | CGGTTCACCATCTCCCGG | AGCGTGGTGACCGTGCCC |
| | AGTCCCGGTTCACCATCTCCCGGGA | CNVNHKPSNTKVDKKVEPKSCD | NO: 351) | GACAACTCCAAGAACACC | TCCAGCAGCTTGGGCACC |
| | CAACTCCAAGAACACCCTGTACCTC | KTHTCPPCPAPELLGGPSVFLF | [SEQ ID | CTGTACCTCCAGATGAAC | CAGACCTACATCTGCAAC |
| | CAGATGAACTCCCTGAGAGCCGAGG | PPKPKDTLMISRTPEVTCVVVD | NO: 355] | TCCCTGAGAGCCGAGGAC | GTGAATCACAAGCCCAGC |
| | ACACCGCCGTGTACTACTGCGCCAG | VSHEDPEVKFNWYVDGVEVHNA | | ACCGCCGTGTACTACTGC | AACACCAAGGTGGACAAG |
| | AGAGGACGGCTACGACGCTTGGTTT | KTKPREEQYNSTYRVVSVLTVL | | GCCAGAGAGGACGGCTAC | AAAGTTGAGCCCAAATCT |
| | GCTTACTGGGGCCAGGGCACCCTGG | HQDWLNGKEYKCKVSNKALPAP | | GACGCTTGGTTTGCTTAC | TGTGACAAAACTCACACA |
| | TCACCGTGTCATCTGCATCCACCAA | IEKTISKAKGQPREPQVYTLPP | | TGGGGCCAGGGCACCCTG | TGCCCACCGTGCCCAGCA |
| | GGGCCCATCGGTCTTCCCCCTGGCA | SRDELTKNQVSLTCLVKGFYPS | | GTCACCGTGTCATCT | CCTGAACTCCTGGGGGGA |
| | CCCTCCTCCAAGAGCACCTCTGGGG | DIAVEWESNGQPENNYKTTPPV | | (Nucleotides 58 to | CCGTCAGTCTTCCTCTTC |
| | GCACAGCGGCCCTGGGCTGCCTGGT | LDSDGSFFLYSKLTVDKSRWQQ | | 414 of SEQ ID NO: | CCCCCAAAACCCAAGGAC |
| | CAAGGACTACTTCCCCGAACCGGTG | GNVFSCSVMHEALHNHYTQKSL | | 351) | ACCCTCATGATCTCCCGG |
| | ACGGTGTCGTGGAACTCAGGCGCCC | SLSPGK | | [SEQ ID NO: 356] | ACCCCTGAGGTCACATGC |
| | TGACCAGCGGCGTGCACACCTTCCC | Without leader [SEQ ID | | EVQLLESGGGLVQPGGSL | GTGGTGGTGGACGTGAGC |
| | GGCTGTCCTACAGTCCTCAGGACTC | NO: 354] | | RLSCAASGYTFTTYWITW | CACGAAGACCCTGAGGTC |
| | TACTCCCTCAGCAGCGTGGTGACCG | EVQLLESGGGLVQPGGSLRLSC | | VRQAPGKGLEWVSDIYPG | AAGTTCAACTGGTACGTG |
| | TGCCCTCCAGCAGCTTGGGCACCCA | AASGYTFTTYWITWVRQAPGKG | | SSICNYNEKFKSRFTISR | GACGGCGTGGAGGTGCAT |
| | GACCTACATCTGCAACGTGAATCAC | LEWVSDIYPGSSICNYNEKFKS | | DNSKNTLYLQMNSLRAED | AATGCCAAGACAAAGCCG |
| | AAGCCCAGCAACACCAAGGTGGACA | RFTISRDNSKNTLYLQMNSLRA | | TAVYYCAREDGYDAWFAY | CGGGAGGAGCAGTACAAC |
| | AGAAAGTTGAGCCCAAATCTTGTGA | EDTAVYYCAREDGYDAWFAYWG | | WGQGTLVTVSS | AGCACGTACCGTGTGGTC |
| | CAAAACTCACACATGCCCACCGTGC | QGTLVTVSSASTKGPSVFPLAP | | [SEQ ID NO: 357] | CACCAGGACTGGCTGAAT |
| | CCAGCACCTGAACTCCTGGGGGGAC | SSKSTSGGTAALGCLVKDYFPE | | | GGCAAGGAGTACAAGTGC |
| | CGTCAGTCTTCCTCTTCCCCCCAAA | PVTVSWNSGALTSGVHTFPAVL | | | AAGGTCTCCAACAAAGCC |
| | ACCCAAGGACACCCTCATGATCTCC | QSSGLYSLSSVVTVPSSSLGTQ | | | CTCCCAGCCCCCATCGAG |
| | CGGACCCCTGAGGTCACATGCGTGG | TYICNVNHKPSNTKVDKKVEPK | | | AAAACCATCTCCAAAGCC |
| | TGGTGGACGTGAGCCACGAAGACCC | SCDKTHTCPPCPAPELLGGPSV | | | AAAGGGCAGCCCCGAGAA |
| | TGAGGTCAAGTTCAACTGGTACGTG | FLFPPKPKDTLMISRTPEVTCV | | | CCACAGGTGTACACCCTG |
| | GACGGCGTGGAGGTGCATAATGCCA | VVDVSHEDPEVKFNWYVDGVEV | | | CCCCCATCCCGGGATGAG |
| | AGACAAAGCCGCGGGAGGAGCAGTA | HNAKTKPREEQYNSTYRVVSVL | | | CTGACCAAGAACCAGGTC |
| | CAACAGCACGTACCGTGTGGTCAGC | TVLHQDWLNGKEYKCKVSNKAL | | | AGCCTGACCTGCCTGGTC |
| | GTCCTCACCGTCCTGCACCAGGACT | PAPIEKTISKAKGQPREPQVYT | | | AAAGGCTTCTATCCCAGC |
| | GGCTGAATGGCAAGGAGTACAAGTG | LPPSRDELTKNQVSLTCLVKGF | | | GACATCGCCGTGGAGTGG |
| | CAAGGTCTCCAACAAAGCCCTCCCA | YPSDIAVEWESNGQPENNYKTT | | | GAGAGCAATGGGCAGCCG |
| | GCCCCCATCGAGAAAACCATCTCCA | PPVLDSDGSFFLYSKLTVDKSR | | | GAGAACAACTACAAGACC |
| | AAGCCAAAGGGCAGCCCCGAGAACC | WQQGNVFSCSVMHEALHNHYTQ | | | ACGCCTCCCGTGCTGGAC |
| | ACAGGTGTACACCCTGCCCCCATCC | KSLSLSPGK | | | TCCGACGGCTCCTTCTTC |
| | CGGGATGAGCTGACCAAGAACCAGG | | | | TTATATTCAAAGCTCACC |
| | TCAGCCTGACCTGCCTGGTCAAAGG | | | | GTGGACAAGAGCAGGTGG |
| | CTTCTATCCCAGCGACATCGCCGTG | | | | CAGCAGGGGAACGTCTTC |
| | GAGTGGGAGAGCAATGGGCAGCCGG | | | | TCATGCTCCGTGATGCAT |
| | AGAACAACTACAAGACCACGCCTCC | | | | GAGGCTCTGCACAACCAC |
| | CGTGCTGGACTCCGACGGCTCCTTC | | | | TACACGCAGAAGAGCCTC |
| | TTCTTATATTCAAAGCTCACCGTGG | | | | TCCCTGTCTCCCGGG |
| | ACAAGAGCAGGTGGCAGCAGGGGAA | | | | (Nucleotides 415 |
| | CGTCTTCTCATGCTCCGTGATGCAT | | | | to 1401 of SEQ ID |
| | GAGGCTCTGCACAACCACTACACGC | | | | NO: 351) |
| | AGAAGAGCCTCTCCCTGTCTCCCGG | | | | [SEQ ID NO: 358] |
| | GAAATGA | | | | ASTKGPSVFPLAPSSKST |
| | Without leader [SEQ ID | | | | SGGTAALGCLVKDYFPEP |
| | NO: 352]: | | | | VTVSWNSGALTSGVHTFP |
| | GAAGTGCAGCTGCTGGAATCTGGCG | | | | AVLQSSGLYSLSSVVTVP |
| | GCGGACTGGTGCAGCCTGGCGGCTC | | | | SSSLGTQTYI CNVNHKPS |
| | TCTGAGACTGTCTTGTGCCGCCTCC | | | | NTKVDKKVEPKSCDKTHT |
| | GGCTACACCTTCACCACCTACTGGA | | | | CPPCPAPELLGGPSVFLF |
| | TCACCTGGGTCCGACAGGCTCCCGG | | | | PPKPKDTLMISRTPEVTC |
| | CAAGGGACTGGAATGGGTCTCCGAC | | | | VVVDVSHEDPEVKFNWYV |
| | ATCTACCCCGGCTCCTCCATCTGCA | | | | DGVEVHNAKTKPREEQYN |
| | ACTACAACGAGAAGTTCAAGTCCCG | | | | STYRVVSVLTVLHQDWLN |
| | GTTCACCATCTCCCGGGACAACTCC | | | | GKEYKCKVSNKALPAPIE |
| | AAGAACACCCTGTACCTCCAGATGA | | | | KTISKAKGQPREPQVYTL |
| | ACTCCCTGAGAGCCGAGGACACCGC | | | | PPSRDELTKNQVSLTCLV |
| | CGTGTACTACTGCGCCAGAGAGGAC | | | | KGFYPSDIAVEWESNGQP |
| | GGCTACGACGCTTGGTTTGCTTACT | | | | ENNYKTTPPVLDSDGSFF |
| | GGGGCCAGGGCACCCTGGTCACCGT | | | | LYSKLTVDKSRWQQGNVF |
| | GTCATCTGCATCCACCAAGGGCCCA | | | | SCSVMHEALHNHYTQKSL |
| | TCGGTCTTCCCCCTGGCACCCTCCT | | | | SLSPGK |
| | CCAAGAGCACCTCTGGGGGCACAGC | | | | [SEQ ID NO: 359] |
| | GGCCCTGGGCTGCCTGGTCAAGGAC | | | | |
| | TACTTCCCCGAACCGGTGACGGTGT | | | | |
| | CGTGGAACTCAGGCGCCCTGACCAG | | | | |
| | CGGCGTGCACACCTTCCCGGCTGTC | | | | |
| | CTACAGTCCTCAGGACTCTACTCCC | | | | |
| | TCAGCAGCGTGGTGACCGTGCCCTC | | | | |
| | CAGCAGCTTGGGCACCCAGACCTAC | | | | |
| | ATCTGCAACGTGAATCACAAGCCCA | | | | |
| | GCAACACCAAGGTGGACAAGAAAGT | | | | |
| | TGAGCCCAAATCTTGTGACAAAACT | | | | |
| | CACACATGCCCACCGTGCCCAGCAC | | | | |
| | CTGAACTCCTGGGGGGACCGTCAGT | | | | |
| | CTTCCTCTTCCCCCCAAAACCCAAG | | | | |
| | GACACCCTCATGATCTCCCGGACCC | | | | |
| | CTGAGGTCACATGCGTGGTGGTGGA | | | | |
| | CGTGAGCCACGAAGACCCTGAGGTC | | | | |
| | AAGTTCAACTGGTACGTGGACGGCG | | | | |
| | TGGAGGTGCATAATGCCAAGACAAA | | | | |
| | GCCGCGGGAGGAGCAGTACAACAGC | | | | |
| | ACGTACCGTGTGGTCAGCGTCCTCA | | | | |
| | CCGTCCTGCACCAGGACTGGCTGAA | | | | |
| | TGGCAAGGAGTACAAGTGCAAGGTC | | | | |
| | TCCAACAAAGCCCTCCCAGCCCCCA | | | | |
| | TCGAGAAAACCATCTCCAAAGCCAA | | | | |
| | AGGGCAGCCCCGAGAACCACAGGTG | | | | |
| | TACACCCTGCCCCCATCCCGGGATG | | | | |
| | AGCTGACCAAGAACCAGGTCAGCCT | | | | |
| | GACCTGCCTGGTCAAAGGCTTCTAT | | | | |
| | CCCAGCGACATCGCCGTGGAGTGGG | | | | |
| | AGAGCAATGGGCAGCCGGAGAACAA | | | | |
| | CTACAAGACCACGCCTCCCGTGCTG | | | | |
| | GACTCCGACGGCTCCTTCTTCTTAT | | | | |
| | ATTCAAAGCTCACCGTGGACAAGAG | | | | |
| | CAGGTGGCAGCAGGGGAACGTCTTC | | | | |
| | TCATGCTCCGTGATGCATGAGGCTC | | | | |
| | TGCACAACCACTACACGCAGAAGAG | | | | |
| | CCTCTCCCTGTCTCCCGGGAAATGA | | | | |
| 7G6- | With leader [SEQ ID NO: | With leader [SEQ ID | ATGGGCTG | GAAGTGCAGCTGCTGGAA | GCATCCACCAAGGGCCCA |
| HCzu19 | 360]: | NO: 362]: | GTCCTGCA | TCTGGCGGCGGACTGGTG | TCGGTCTTCCCCCTGGCA |
| | ATGGGCTGGTCCTGCATCATCCTGT | MGWSCIILFLVATATGVHSEVQ | TCATCCTG | CAGCCTGGCGGCTCTCTG | CCCTCCTCCAAGAGCACC |
| | TTCTGGTGGCCACCGCCACCGGCGT | LLESGGGLVQPGGSLRLSCAAS | TTTCTGGT | AGACTGTCTTGTGCCGCC | TCTGGGGGCACAGCGGCC |
| | GCACAGCGAAGTGCAGCTGCTGGAA | GYTFTTYWITWVRQAPGKGLEW | GGCCACCG | TCCGGCTACACCTTCACC | CTGGGCTGCCTGGTCAAG |
| | TCTGGCGGCGGACTGGTGCAGCCTG | VSDIYPGSSICNYADKFKGRFT | CCACCGGC | ACCTACTGGATCACCTGG | GACTACTTCCCCGAACCG |
| | GCGGCTCTCTGAGACTGTCTTGTGC | ISRDNSKNTLYLQMNSLRAEDT | GTGCACAG | GTCCGACAGGCTCCCGGC | GTGACGGTGTCGTGGAAC |
| | CGCCTCCGGCTACACCTTCACCACC | AVYYCAREDGYDAWFAYWGQGT | C | AAGGGACTGGAATGGGTC | TCAGGCGCCCTGACCAGC |
| | TACTGGATCACCTGGGTCCGACAGG | LVTVSSASTKGPSVFPLAPSSK | (Nucleo- | TCCGACATCTACCCCGGC | GGCGTGCACACCTTCCCG |
| | CTCCCGGCAAGGGACTGGAATGGGT | STSGGTAALGCLVKDYFPEPVT | tides 1 | TCCTCCATCTGCAACTAC | GCTGTCCTACAGTCCTCA |
| | CTCCGACATCTACCCCGGCTCCTCC | VSWNSGALTSGVHTFPAVLQSS | to 57 of | GCCGACAAGTTCAAGGGC | GGACTCTACTCCCTCAGC |
| | ATCTGCAACTACGCCGACAAGTTCA | GLYSLSSVVTVPSSSLGTQTYI | SEQ ID | CGGTTCACCATCTCCCGG | AGCGTGGTGACCGTGCCC |
| | AGGGCCGGTTCACCATCTCCCGGGA | CNVNHKPSNTKVDKKVEPKSCD | NO: 360) | GACAACTCCAAGAACACC | TCCAGCAGCTTGGGCACC |
| | CAACTCCAAGAACACCCTGTACCTC | KTHTCPPCPAPELLGGPSVFLF | [SEQ ID | CTGTACCTCCAGATGAAC | CAGACCTACATCTGCAAC |
| | CAGATGAACTCCCTGAGAGCCGAGG | PPKPKDTLMISRTPEVTCVVVD | NO: 364] | TCCCTGAGAGCCGAGGAC | GTGAATCACAAGCCCAGC |
| | ACACCGCCGTGTACTACTGCGCCAG | VSHEDPEVKFNWYVDGVEVHNA | | ACCGCCGTGTACTACTGC | AACACCAAGGTGGACAAG |
| | AGAGGACGGCTACGACGCTTGGTTT | KTKPREEQYNSTYRVVSVLTVL | | GCCAGAGAGGACGGCTAC | AAAGTTGAGCCCAAATCT |
| | GCTTACTGGGGCCAGGGCACCCTGG | HQDWLNGKEYKCKVSNKALPAP | | GACGCTTGGTTTGCTTAC | TGTGACAAAACTCACACA |
| | TCACCGTGTCATCTGCATCCACCAA | IEKTISKAKGQPREPQVYTLPP | | TGGGGCCAGGGCACCCTG | TGCCCACCGTGCCCAGCA |
| | GGGCCCATCGGTCTTCCCCCTGGCA | SRDELTKNQVSLTCLVKGFYPS | | GTCACCGTGTCATCT | CCTGAACTCCTGGGGGGA |
| | CCCTCCTCCAAGAGCACCTCTGGGG | DIAVEWESNGQPENNYKTTPPV | | (Nucleotides 58 to | CCGTCAGTCTTCCTCTTC |
| | GCACAGCGGCCCTGGGCTGCCTGGT | LDSDGSFFLYSKLTVDKSRWQQ | | 414 of SEQ ID NO: | CCCCCAAAACCCAAGGAC |
| | CAAGGACTACTTCCCCGAACCGGTG | GNVFSCSVMHEALHNHYTQKSL | | 360) [SEQ ID NO: | ACCCTCATGATCTCCCGG |
| | ACGGTGTCGTGGAACTCAGGCGCCC | SLSPGK | | 365] | ACCCCTGAGGTCACATGC |
| | TGACCAGCGGCGTGCACACCTTCCC | Without leader [SEQ ID | | EVQLLESGGGLVQPGGSL | GTGGTGGTGGACGTGAGC |
| | GGCTGTCCTACAGTCCTCAGGACTC | NO: 363]: | | RLSCAASGYTFTTYWITW | CACGAAGACCCTGAGGTC |
| | TACTCCCTCAGCAGCGTGGTGACCG | EVQLLESGGGLVQPGGSLRLSC | | VRQAPGKGLEWVSDIYPG | AAGTTCAACTGGTACGTG |
| | TGCCCTCCAGCAGCTTGGGCACCCA | AASGYTFTTYWITWVRQAPGKG | | SSICNYADKFKGRFTISR | GACGGCGTGGAGGTGCAT |
| | GACCTACATCTGCAACGTGAATCAC | LEWVSDIYPGSSICNYADKFKG | | DNSKNTLYLQMNSLRAED | AATGCCAAGACAAAGCCG |
| | AAGCCCAGCAACACCAAGGTGGACA | RFTISRDNSKNTLYLQMNSLRA | | TAVYYCAREDGYDAWFAY | CGGGAGGAGCAGTACAAC |
| | AGAAAGTTGAGCCCAAATCTTGTGA | EDTAVYYCAREDGYDAWFAYWG | | WGQGTLVTVSS | AGCACGTACCGTGTGGTC |
| | CAAAACTCACACATGCCCACCGTGC | QGTLVTVSSASTKGPSVFPLAP | | [SEQ ID NO: 366] | AGCGTCCTCACCGTCCTG |
| | CCAGCACCTGAACTCCTGGGGGGAC | SSKSTSGGTAALGCLVKDYFPE | | | CACCAGGACTGGCTGAAT |
| | CGTCAGTCTTCCTCTTCCCCCCAAA | PVTVSWNSGALTSGVHTFPAVL | | | GGCAAGGAGTACAAGTGC |
| | ACCCAAGGACACCCTCATGATCTCC | QSSGLYSLSSVVTVPSSSLGTQ | | | AAGGTCTCCAACAAAGCC |
| | CGGACCCCTGAGGTCACATGCGTGG | TYICNVNHKPSNTKVDKKVEPK | | | CTCCCAGCCCCCATCGAG |
| | TGGTGGACGTGAGCCACGAAGACCC | SCDKTHTCPPCPAPELLGGPSV | | | AAAACCATCTCCAAAGCC |
| | TGAGGTCAAGTTCAACTGGTACGTG | FLFPPKPKDTLMISRTPEVTCV | | | AAAGGGCAGCCCCGAGAA |
| | GACGGCGTGGAGGTGCATAATGCCA | VVDVSHEDPEVKFNWYVDGVEV | | | CCACAGGTGTACACCCTG |
| | AGACAAAGCCGCGGGAGGAGCAGTA | HNAKTKPREEQYNSTYRVVSVL | | | CCCCCATCCCGGGATGAG |
| | CAACAGCACGTACCGTGTGGTCAGC | TVLHQDWLNGKEYKCKVSNKAL | | | CTGACCAAGAACCAGGTC |
| | GTCCTCACCGTCCTGCACCAGGACT | PAPIEKTISKAKGQPREPQVYT | | | AGCCTGACCTGCCTGGTC |
| | GGCTGAATGGCAAGGAGTACAAGTG | LPPSRDELTKNQVSLTCLVKGF | | | AAAGGCTTCTATCCCAGC |
| | CAAGGTCTCCAACAAAGCCCTCCCA | YPSDIAVEWESNGQPENNYKTT | | | GACATCGCCGTGGAGTGG |
| | GCCCCCATCGAGAAAACCATCTCCA | PPVLDSDGSFFLYSKLTVDKSR | | | GAGAGCAATGGGCAGCCG |
| | AAGCCAAAGGGCAGCCCCGAGAACC | WQQGNVFSCSVMHEALHNHYTQ | | | GAGAACAACTACAAGACC |
| | ACAGGTGTACACCCTGCCCCCATCC | KSLSLSPGK | | | ACGCCTCCCGTGCTGGAC |
| | CGGGATGAGCTGACCAAGAACCAGG | | | | TCCGACGGCTCCTTCTTC |
| | TCAGCCTGACCTGCCTGGTCAAAGG | | | | TTATATTCAAAGCTCACC |
| | CTTCTATCCCAGCGACATCGCCGTG | | | | GTGGACAAGAGCAGGTGG |
| | GAGTGGGAGAGCAATGGGCAGCCGG | | | | CAGCAGGGGAACGTCTTC |
| | AGAACAACTACAAGACCACGCCTCC | | | | TCATGCTCCGTGATGCAT |
| | CGTGCTGGACTCCGACGGCTCCTTC | | | | GAGGCTCTGCACAACCAC |
| | TTCTTATATTCAAAGCTCACCGTGG | | | | TACACGCAGAAGAGCCTC |
| | ACAAGAGCAGGTGGCAGCAGGGGAA | | | | TCCCTGTCTCCCGGG |
| | CGTCTTCTCATGCTCCGTGATGCAT | | | | (Nucleotides 415 |
| | GAGGCTCTGCACAACCACTACACGC | | | | to 1401 of SEQ ID |
| | AGAAGAGCCTCTCCCTGTCTCCCGG | | | | NO: 360) |
| | GAAATGA | | | | [SEQ ID NO: 367] |
| | Without leader [SEQ ID | | | | ASTKGPSVFPLAPSSKST |
| | NO: 361]: | | | | SGGTAALGCLVKDYFPEP |
| | GAAGTGCAGCTGCTGGAATCTGGCG | | | | VTVSWNSGALTSGVHTFP |
| | GCGGACTGGTGCAGCCTGGCGGCTC | | | | AVLQSSGLYSLSSVVTVP |
| | TCTGAGACTGTCTTGTGCCGCCTCC | | | | SSSLGTQTYICNVNHKPS |
| | GGCTACACCTTCACCACCTACTGGA | | | | NTKVDKKVEPKSCDKTHT |
| | TCACCTGGGTCCGACAGGCTCCCGG | | | | CPPCPAPELLGGPSVFLF |
| | CAAGGGACTGGAATGGGTCTCCGAC | | | | PPKPKDTLMISRTPEVTC |
| | ATCTACCCCGGCTCCTCCATCTGCA | | | | VVVDVSHEDPEVKFNWYV |
| | ACTACGCCGACAAGTTCAAGGGCCG | | | | DGVEVHNAKTKPREEQYN |
| | GTTCACCATCTCCCGGGACAACTCC | | | | STYRVVSVLTVLHQDWLN |
| | AAGAACACCCTGTACCTCCAGATGA | | | | GKEYKCKVSNKALPAPIE |
| | ACTCCCTGAGAGCCGAGGACACCGC | | | | KTISKAKGQPREPQVYTL |
| | CGTGTACTACTGCGCCAGAGAGGAC | | | | PPSRDELTKNQVSLTCLV |
| | GGCTACGACGCTTGGTTTGCTTACT | | | | KGFYPSDIAVEWESNGQP |
| | GGGGCCAGGGCACCCTGGTCACCGT | | | | ENNYKTTPPVLDSDGSFF |
| | GTCATCTGCATCCACCAAGGGCCCA | | | | LYSKLTVDKSRWQQGNVF |
| | TCGGTCTTCCCCCTGGCACCCTCCT | | | | SCSVMHEALHNHYTQKSL |
| | CCAAGAGCACCTCTGGGGGCACAGC | | | | SLSPGK |
| | GGCCCTGGGCTGCCTGGTCAAGGAC | | | | [SEQ ID NO: 368] |
| | TACTTCCCCGAACCGGTGACGGTGT | | | | |
| | CGTGGAACTCAGGCGCCCTGACCAG | | | | |
| | CGGCGTGCACACCTTCCCGGCTGTC | | | | |
| | CTACAGTCCTCAGGACTCTACTCCC | | | | |
| | TCAGCAGCGTGGTGACCGTGCCCTC | | | | |
| | CAGCAGCTTGGGCACCCAGACCTAC | | | | |
| | ATCTGCAACGTGAATCACAAGCCCA | | | | |
| | GCAACACCAAGGTGGACAAGAAAGT | | | | |
| | TGAGCCCAAATCTTGTGACAAAACT | | | | |
| | CACACATGCCCACCGTGCCCAGCAC | | | | |
| | CTGAACTCCTGGGGGGACCGTCAGT | | | | |
| | CTTCCTCTTCCCCCCAAAACCCAAG | | | | |
| | GACACCCTCATGATCTCCCGGACCC | | | | |
| | CTGAGGTCACATGCGTGGTGGTGGA | | | | |
| | CGTGAGCCACGAAGACCCTGAGGTC | | | | |
| | AAGTTCAACTGGTACGTGGACGGCG | | | | |
| | TGGAGGTGCATAATGCCAAGACAAA | | | | |
| | GCCGCGGGAGGAGCAGTACAACAGC | | | | |
| | ACGTACCGTGTGGTCAGCGTCCTCA | | | | |
| | CCGTCCTGCACCAGGACTGGCTGAA | | | | |
| | TGGCAAGGAGTACAAGTGCAAGGTC | | | | |
| | TCCAACAAAGCCCTCCCAGCCCCCA | | | | |
| | TCGAGAAAACCATCTCCAAAGCCAA | | | | |
| | AGGGCAGCCCCGAGAACCACAGGTG | | | | |
| | TACACCCTGCCCCCATCCCGGGATG | | | | |
| | AGCTGACCAAGAACCAGGTCAGCCT | | | | |
| | GACCTGCCTGGTCAAAGGCTTCTAT | | | | |
| | CCCAGCGACATCGCCGTGGAGTGGG | | | | |
| | AGAGCAATGGGCAGCCGGAGAACAA | | | | |
| | CTACAAGACCACGCCTCCCGTGCTG | | | | |
| | GACTCCGACGGCTCCTTCTTCTTAT | | | | |
| | ATTCAAAGCTCACCGTGGACAAGAG | | | | |
| | CAGGTGGCAGCAGGGGAACGTCTTC | | | | |
| | TCATGCTCCGTGATGCATGAGGCTC | | | | |
| | TGCACAACCACTACACGCAGAAGAG | | | | |
| | CCTCTCCCTGTCTCCCGGGAAATGA | | | | |
| 7G6- | With leader [SEQ ID NO: | With leader [SEQ ID | ATGGGCTG | GAAGTGCAGCTGCTGGAA | GCATCCACCAAGGGCCCA |
| HCzu20 | 369]: | NO: 371]: | GTCCTGCA | TCTGGCGGCGGACTGGTG | TCGGTCTTCCCCCTGGCA |
| | ATGGGCTGGTCCTGCATCATCCTGT | MGWSCIILFLVATATGVHSEVQ | TCATCCTG | CAGCCTGGCGGCTCTCTG | CCCTCCTCCAAGAGCACC |
| | TTCTGGTGGCCACCGCCACCGGCGT | LLESGGGLVQPGGSLRLSCAAS | TTTCTGGT | AGACTGTCTTGTGCCGCC | TCTGGGGGCACAGCGGCC |
| | GCACAGCGAAGTGCAGCTGCTGGAA | GYTFTTYWITWVRQAPGKGLEW | GGCCACCG | TCCGGCTACACCTTCACC | CTGGGCTGCCTGGTCAAG |
| | TCTGGCGGCGGACTGGTGCAGCCTG | VSDIYPGSSICNYADKFKGRFT | CCACCGGC | ACCTACTGGATCACCTGG | GACTACTTCCCCGAACCG |
| | GCGGCTCTCTGAGACTGTCTTGTGC | ISRDNSKNTLYLQMNSLRAEDT | GTGCACAG | GTCCGACAGGCTCCCGGC | GTGACGGTGTCGTGGAAC |
| | CGCCTCCGGCTACACCTTCACCACC | AVYYCAKEDGYDAWFAYWGQGT | C | AAGGGACTGGAATGGGTC | TCAGGCGCCCTGACCAGC |
| | TACTGGATCACCTGGGTCCGACAGG | LVTVSSASTKGPSVFPLAPSSK | (Nucleo- | TCCGACATCTACCCCGGC | GGCGTGCACACCTTCCCG |
| | CTCCCGGCAAGGGACTGGAATGGGT | STSGGTAALGCLVKDYFPEPVT | tides 1 | TCCTCCATCTGCAACTAC | GCTGTCCTACAGTCCTCA |
| | CTCCGACATCTACCCCGGCTCCTCC | VSWNSGALTSGVHTFPAVLQSS | to 57 of | GCCGACAAGTTCAAGGGC | GGACTCTACTCCCTCAGC |
| | ATCTGCAACTACGCCGACAAGTTCA | GLYSLSSVVTVPSSSLGTQTYI | SEQ ID | CGGTTCACCATCTCCCGG | AGCGTGGTGACCGTGCCC |
| | AGGGCCGGTTCACCATCTCCCGGGA | CNVNHKPSNTKVDKKVEPKSCD | NO: 369) | GACAACTCCAAGAACACC | TCCAGCAGCTTGGGCACC |
| | CAACTCCAAGAACACCCTGTACCTC | KTHTCPPCPAPELLGGPSVFLF | [SEQ ID | CTGTACCTCCAGATGAAC | CAGACCTACATCTGCAAC |
| | CAGATGAACTCCCTGAGAGCCGAGG | PPKPKDTLMISRTPEVTCVVVD | NO: 373] | TCCCTGAGAGCCGAGGAC | GTGAATCACAAGCCCAGC |
| | ACACCGCCGTGTACTACTGCGCCAA | VSHEDPEVKFNWYVDGVEVHNA | | ACCGCCGTGTACTACTGC | AACACCAAGGTGGACAAG |
| | AGAGGACGGCTACGACGCTTGGTTT | KTKPREEQYNSTYRVVSVLTVL | | GCCAAAGAGGACGGCTAC | AAAGTTGAGCCCAAATCT |
| | GCTTACTGGGGCCAGGGCACCCTGG | HQDWLNGKEYKCKVSNKALPAP | | GACGCTTGGTTTGCTTAC | TGTGACAAAACTCACACA |
| | TCACCGTGTCATCTGCATCCACCAA | IEKTISKAKGQPREPQVYTLPP | | TGGGGCCAGGGCACCCTG | TGCCCACCGTGCCCAGCA |
| | GGGCCCATCGGTCTTCCCCCTGGCA | SRDELTKNQVSLTCLVKGFYPS | | GTCACCGTGTCATCT | CCTGAACTCCTGGGGGGA |
| | CCCTCCTCCAAGAGCACCTCTGGGG | DIAVEWESNGQPENNYKTTPPV | | (Nucleotides 58 to | CCGTCAGTCTTCCTCTTC |
| | GCACAGCGGCCCTGGGCTGCCTGGT | LDSDGSFFLYSKLTVDKSRWQQ | | 414 of SEQ ID NO: | CCCCCAAAACCCAAGGAC |
| | CAAGGACTACTTCCCCGAACCGGTG | GNVFSCSVMHEALHNHYTQKSL | | 369) | ACCCTCATGATCTCCCGG |
| | ACGGTGTCGTGGAACTCAGGCGCCC | SLSPGK | | [SEQ ID NO: 374] | ACCCCTGAGGTCACATGC |
| | TGACCAGCGGCGTGCACACCTTCCC | Without leader [SEQ ID | | EVQLLESGGGLVQPGGSL | GTGGTGGTGGACGTGAGC |
| | GGCTGTCCTACAGTCCTCAGGACTC | NO: 372]: | | RLSCAASGYTFTTYWITW | CACGAAGACCCTGAGGTC |
| | TACTCCCTCAGCAGCGTGGTGACCG | EVQLLESGGGLVQPGGSLRLSC | | VRQAPGKGLEWVSDIYPG | AAGTTCAACTGGTACGTG |
| | TGCCCTCCAGCAGCTTGGGCACCCA | AASGYTFTTYWITWVRQAPGKG | | SSICNYADKFKGRFTISR | GACGGCGTGGAGGTGCAT |
| | GACCTACATCTGCAACGTGAATCAC | LEWVSDIYPGSSICNYADKFKG | | DNSKNTLYLQMNSLRAED | AATGCCAAGACAAAGCCG |
| | AAGCCCAGCAACACCAAGGTGGACA | RFTISRDNSKNTLYLQMNSLRA | | TAVYYCAKEDGYDAWFAY | CGGGAGGAGCAGTACAAC |
| | AGAAAGTTGAGCCCAAATCTTGTGA | EDTAVYYCAKEDGYDAWFAYWG | | WGQGTLVTVSS | AGCACGTACCGTGTGGTC |
| | CAAAACTCACACATGCCCACCGTGC | QGTLVTVSSASTKGPSVFPLAP | | [SEQ ID NO: 375] | AGCGTCCTCACCGTCCTG |
| | CCAGCACCTGAACTCCTGGGGGGAC | SSKSTSGGTAALGCLVKDYFPE | | | CACCAGGACTGGCTGAAT |
| | CGTCAGTCTTCCTCTTCCCCCCAAA | PVTVSWNSGALTSGVHTFPAVL | | | GGCAAGGAGTACAAGTGC |
| | ACCCAAGGACACCCTCATGATCTCC | QSSGLYSLSSVVTVPSSSLGTQ | | | AAGGTCTCCAACAAAGCC |
| | CGGACCCCTGAGGTCACATGCGTGG | TYICNVNHKPSNTKVDKKVEPK | | | CTCCCAGCCCCCATCGAG |
| | TGGTGGACGTGAGCCACGAAGACCC | SCDKTHTCPPCPAPELLGGPSV | | | AAAACCATCTCCAAAGCC |
| | TGAGGTCAAGTTCAACTGGTACGTG | FLFPPKPKDTLMISRTPEVTCV | | | AAAGGGCAGCCCCGAGAA |
| | GACGGCGTGGAGGTGCATAATGCCA | VVDVSHEDPEVKFNWYVDGVEV | | | CCACAGGTGTACACCCTG |
| | AGACAAAGCCGCGGGAGGAGCAGTA | HNAKTKPREEQYNSTYRVVSVL | | | CCCCCATCCCGGGATGAG |
| | CAACAGCACGTACCGTGTGGTCAGC | TVLHQDWLNGKEYKCKVSNKAL | | | CTGACCAAGAACCAGGTC |
| | GTCCTCACCGTCCTGCACCAGGACT | PAPIEKTISKAKGQPREPQVYT | | | AGCCTGACCTGCCTGGTC |
| | GGCTGAATGGCAAGGAGTACAAGTG | LPPSRDELTKNQVSLTCLVKGF | | | AAAGGCTTCTATCCCAGC |
| | CAAGGTCTCCAACAAAGCCCTCCCA | YPSDIAVEWESNGQPENNYKTT | | | GACATCGCCGTGGAGTGG |
| | GCCCCCATCGAGAAAACCATCTCCA | PPVLDSDGSFFLYSKLTVDKSR | | | GAGAGCAATGGGCAGCCG |
| | AAGCCAAAGGGCAGCCCCGAGAACC | WQQGNVFSCSVMHEALHNHYTQ | | | GAGAACAACTACAAGACC |
| | ACAGGTGTACACCCTGCCCCCATCC | KSLSLSPGK | | | ACGCCTCCCGTGCTGGAC |
| | CGGGATGAGCTGACCAAGAACCAGG | | | | TCCGACGGCTCCTTCTTC |
| | TCAGCCTGACCTGCCTGGTCAAAGG | | | | TTATATTCAAAGCTCACC |
| | CTTCTATCCCAGCGACATCGCCGTG | | | | GTGGACAAGAGCAGGTGG |
| | GAGTGGGAGAGCAATGGGCAGCCGG | | | | CAGCAGGGGAACGTCTTC |
| | AGAACAACTACAAGACCACGCCTCC | | | | TCATGCTCCGTGATGCAT |
| | CGTGCTGGACTCCGACGGCTCCTTC | | | | GAGGCTCTGCACAACCAC |
| | TTCTTATATTCAAAGCTCACCGTGG | | | | TACACGCAGAAGAGCCTC |
| | ACAAGAGCAGGTGGCAGCAGGGGAA | | | | TCCCTGTCTCCCGGG |
| | CGTCTTCTCATGCTCCGTGATGCAT | | | | (Nucleotide 415 to |
| | GAGGCTCTGCACAACCACTACACGC | | | | 1401 of SEQ ID NO: |
| | AGAAGAGCCTCTCCCTGTCTCCCGG | | | | 369) |
| | GAAATGA | | | | [SEQ ID NO: 376] |
| | Without leader [SEQ ID | | | | ASTKGPSVFPLAPSSKST |
| | NO: 370] | | | | SGGTAALGCLVKDYFPEP |
| | GAAGTGCAGCTGCTGGAATCTGGCG | | | | VTVSWNSGALTSGVHTFP |
| | GCGGACTGGTGCAGCCTGGCGGCTC | | | | AVLQSSGLYSLSSVVTVP |
| | TCTGAGACTGTCTTGTGCCGCCTCC | | | | SSSLGTQTYICNVNHKPS |
| | GGCTACACCTTCACCACCTACTGGA | | | | NTKVDKKVEPKSCDKTHT |
| | TCACCTGGGTCCGACAGGCTCCCGG | | | | CPPCPAPELLGGPSVFLF |
| | CAAGGGACTGGAATGGGTCTCCGAC | | | | PPKPKDTLMISRTPEVTC |
| | ATCTACCCCGGCTCCTCCATCTGCA | | | | VVVDVSHEDPEVKFNWYV |
| | ACTACGCCGACAAGTTCAAGGGCCG | | | | DGVEVHNAKTKPREEQYN |
| | GTTCACCATCTCCCGGGACAACTCC | | | | STYRVVSVLTVLHQDWLN |
| | AAGAACACCCTGTACCTCCAGATGA | | | | GKEYKCKVSNKALPAPIE |
| | ACTCCCTGAGAGCCGAGGACACCGC | | | | KTISKAKGQPREPQVYTL |
| | CGTGTACTACTGCGCCAAAGAGGAC | | | | PPSRDELTKNQVSLTCLV |
| | GGCTACGACGCTTGGTTTGCTTACT | | | | KGFYPSDIAVEWESNGQP |
| | GGGGCCAGGGCACCCTGGTCACCGT | | | | ENNYKTTPPVLDSDGSFF |
| | GTCATCTGCATCCACCAAGGGCCCA | | | | LYSKLTVDKSRWQQGNVF |
| | TCGGTCTTCCCCCTGGCACCCTCCT | | | | SCSVMHEALHNHYTQKSL |
| | CCAAGAGCACCTCTGGGGGCACAGC | | | | SLSPGK |
| | GGCCCTGGGCTGCCTGGTCAAGGAC | | | | [SEQ ID NO: 377] |
| | TACTTCCCCGAACCGGTGACGGTGT | | | | |
| | CGTGGAACTCAGGCGCCCTGACCAG | | | | |
| | CGGCGTGCACACCTTCCCGGCTGTC | | | | |
| | CTACAGTCCTCAGGACTCTACTCCC | | | | |
| | TCAGCAGCGTGGTGACCGTGCCCTC | | | | |
| | CAGCAGCTTGGGCACCCAGACCTAC | | | | |
| | ATCTGCAACGTGAATCACAAGCCCA | | | | |
| | GCAACACCAAGGTGGACAAGAAAGT | | | | |
| | TGAGCCCAAATCTTGTGACAAAACT | | | | |
| | CACACATGCCCACCGTGCCCAGCAC | | | | |
| | CTGAACTCCTGGGGGGACCGTCAGT | | | | |
| | CTTCCTCTTCCCCCCAAAACCCAAG | | | | |
| | GACACCCTCATGATCTCCCGGACCC | | | | |
| | CTGAGGTCACATGCGTGGTGGTGGA | | | | |
| | CGTGAGCCACGAAGACCCTGAGGTC | | | | |
| | AAGTTCAACTGGTACGTGGACGGCG | | | | |
| | TGGAGGTGCATAATGCCAAGACAAA | | | | |
| | GCCGCGGGAGGAGCAGTACAACAGC | | | | |
| | ACGTACCGTGTGGTCAGCGTCCTCA | | | | |
| | CCGTCCTGCACCAGGACTGGCTGAA | | | | |
| | TGGCAAGGAGTACAAGTGCAAGGTC | | | | |
| | TCCAACAAAGCCCTCCCAGCCCCCA | | | | |
| | TCGAGAAAACCATCTCCAAAGCCAA | | | | |
| | AGGGCAGCCCCGAGAACCACAGGTG | | | | |
| | TACACCCTGCCCCCATCCCGGGATG | | | | |
| | AGCTGACCAAGAACCAGGTCAGCCT | | | | |
| | GACCTGCCTGGTCAAAGGCTTCTAT | | | | |
| | CCCAGCGACATCGCCGTGGAGTGGG | | | | |
| | AGAGCAATGGGCAGCCGGAGAACAA | | | | |
| | CTACAAGACCACGCCTCCCGTGCTG | | | | |
| | GACTCCGACGGCTCCTTCTTCTTAT | | | | |
| | ATTCAAAGCTCACCGTGGACAAGAG | | | | |
| | CAGGTGGCAGCAGGGGAACGTCTTC | | | | |
| | TCATGCTCCGTGATGCATGAGGCTC | | | | |
| | TGCACAACCACTACACGCAGAAGAG | | | | |
| | CCTCTCCCTGTCTCCCGGGAAATGA | | | | |
| 7G6- | With leader [SEQ ID NO: | With leader [SEQ ID | ATGGGCTG | GAAGTGCAGCTGCTGGAA | GCCTCCACCAAGGGCCCA |
| HCzu23 | 378]: | NO: 380]: | GTCCTGCA | TCTGGCGGCGGACTGGTG | TCGGTCTTCCCCCTGGCA |
| | ATGGGCTGGTCCTGCATCATCCTGT | MGWSCIILFLVATATGVHSEVQ | TCATCCTG | CAGCCTGGCGGCTCTCTG | CCCTCCTCCAAGAGCACC |
| | TTCTGGTGGCCACCGCCACCGGCGT | LLESGGGLVQPGGSLRLSCAAS | TTTCTGGT | AGACTGTCTTGTGCCGCC | TCTGGGGGCACAGCGGCC |
| | GCACAGCGAAGTGCAGCTGCTGGAA | GYTFTTYWITWVRQAPGKGLEW | GGCCACCG | TCCGGCTACACCTTCACC | CTGGGCTGCCTGGTCAAG |
| | TCTGGCGGCGGACTGGTGCAGCCTG | VSDIYPGSSISNYADSVKGRFT | CCACCGGC | ACCTACTGGATCACCTGG | GACTACTTCCCCGAACCG |
| | GCGGCTCTCTGAGACTGTCTTGTGC | ISRDNSKNTLYLQMNSLRAEDT | GTGCACAG | GTCCGACAGGCTCCCGGC | GTGACGGTGTCGTGGAAC |
| | CGCCTCCGGCTACACCTTCACCACC | AVYYCAREDGYDAWFAYWGQGT | C | AAGGGACTGGAATGGGTG | TCAGGCGCCCTGACCAGC |
| | TACTGGATCACCTGGGTCCGACAGG | LVTVSSASTKGPSVFPLAPSSK | (Nucleo- | TCCGACATCTACCCCGGC | GGCGTGCACACCTTCCCG |
| | CTCCCGGCAAGGGACTGGAATGGGT | STSGGTAALGCLVKDYFPEPVT | tides 1 | TCCTCCATCTCCAACTAC | GCTGTCCTACAGTCCTCA |
| | GTCCGACATCTACCCCGGCTCCTCC | VSWNSGALTSGVHTFPAVLQSS | to 57 of | GCCGACTCCGTCAAGGGC | GGACTCTACTCCCTCAGC |
| | ATCTCCAACTACGCCGACTCCGTCA | GLYSLSSVVTVPSSSLGTQTYI | SEQ ID | CGGTTCACCATCTCCCGG | AGCGTGGTGACCGTGCCC |
| | AGGGCCGGTTCACCATCTCCCGGGA | CNVNHKPSNTKVDKKVEPKSCD | NO: 378) | GACAACTCCAAGAACACC | TCCAGCAGCTTGGGCACC |
| | CAACTCCAAGAACACCCTGTACCTC | KTHTCPPCPAPELLGGPSVFLF | [SEQ ID | CTGTACCTCCAGATGAAC | CAGACCTACATCTGCAAC |
| | CAGATGAACTCCCTGCGGGCCGAGG | PPKPKDTLMISRTPEVTCVVVD | NO: 82] | TCCCTGCGGGCCGAGGAC | GTGAATCACAAGCCCAGC |
| | ACACCGCCGTGTACTACTGCGCCAG | VSHEDPEVKFNWYVDGVEVHNA | | ACCGCCGTGTACTACTGC | AACACCAAGGTGGACAAG |
| | AGAGGACGGCTACGACGCTTGGTTT | KTKPREEQYNSTYRVVSVLTVL | | GCCAGAGAGGACGGCTAC | AAAGTTGAGCCCAAATCT |
| | GCCTACTGGGGCCAGGGCACCCTGG | HQDWLNGKEYKCKVSNKALPAP | | GACGCTTGGTTTGCCTAC | TGTGACAAAACTCACACA |
| | TCACCGTGTCATCTGCCTCCACCAA | IEKTISKAKGQPREPQVYTLPP | | TGGGGCCAGGGCACCCTG | TGCCCACCGTGCCCAGCA |
| | GGGCCCATCGGTCTTCCCCCTGGCA | SRDELTKNQVSLTCLVKGFYPS | | GTCACCGTGTCATCT | CCTGAACTCCTGGGGGGA |
| | CCCTCCTCCAAGAGCACCTCTGGGG | DIAVEWESNGQPENNYKTTPPV | | (Nucleotides 58 to | CCGTCAGTCTTCCTCTTC |
| | GCACAGCGGCCCTGGGCTGCCTGGT | LDSDGSFFLYSKLTVDKSRWQQ | | 414 of SEQ ID NO: | CCCCCAAAACCCAAGGAC |
| | CAAGGACTACTTCCCCGAACCGGTG | GNVFSCSVMHEALHNHYTQKSL | | 378) | ACCCTCATGATCTCCCGG |
| | ACGGTGTCGTGGAACTCAGGCGCCC | SLSPGK | | [SEQ ID NO: 383] | ACCCCTGAGGTCACATGC |
| | TGACCAGCGGCGTGCACACCTTCCC | Without leader [SEQ ID | | EVQLLESGGGLVQPGGSL | GTGGTGGTGGACGTGAGC |
| | GGCTGTCCTACAGTCCTCAGGACTC | NO: 381]: | | RLSCAASGYTFTTYWITW | CACGAAGACCCTGAGGTC |
| | TACTCCCTCAGCAGCGTGGTGACCG | EVQLLESGGGLVQPGGSLRLSC | | VRQAPGKGLEWVSDIYPG | AAGTTCAACTGGTACGTG |
| | TGCCCTCCAGCAGCTTGGGCACCCA | AASGYTFTTYWITWVRQAPGKG | | SSISNYADSVKGRFTISR | GACGGCGTGGAGGTGCAT |
| | GACCTACATCTGCAACGTGAATCAC | LEWVSDIYPGSSISNYADSVKG | | DNSKNTLYLQMNSLRAED | AATGCCAAGACAAAGCCG |
| | AAGCCCAGCAACACCAAGGTGGACA | RFTISRDNSKNTLYLQMNSLRA | | TAVYYCAREDGYDAWFAY | CGGGAGGAGCAGTACAAC |
| | AGAAAGTTGAGCCCAAATCTTGTGA | EDTAVYYCAREDGYDAWFAYWG | | WGQGTLVTVSS | AGCACGTACCGTGTGGTC |
| | CAAAACTCACACATGCCCACCGTGC | QGTLVTVSSASTKGPSVFPLAP | | [SEQ ID NO: 384] | AGCGTCCTCACCGTCCTG |
| | CCAGCACCTGAACTCCTGGGGGGAC | SSKSTSGGTAALGCLVKDYFPE | | | CACCAGGACTGGCTGAAT |
| | CGTCAGTCTTCCTCTTCCCCCCAAA | PVTVSWNSGALTSGVHTFPAVL | | | GGCAAGGAGTACAAGTGC |
| | ACCCAAGGACACCCTCATGATCTCC | QSSGLYSLSSVVTVPSSSLGTQ | | | AAGGTCTCCAACAAAGCC |
| | CGGACCCCTGAGGTCACATGCGTGG | TYICNVNHKPSNTKVDKKVEPK | | | CTCCCAGCCCCCATCGAG |
| | TGGTGGACGTGAGCCACGAAGACCC | SCDKTHTCPPCPAPELLGGPSV | | | AAAACCATCTCCAAAGCC |
| | TGAGGTCAAGTTCAACTGGTACGTG | FLFPPKPKDTLMISRTPEVTCV | | | AAAGGGCAGCCCCGAGAA |
| | GACGGCGTGGAGGTGCATAATGCCA | VVDVSHEDPEVKFNWYVDGVEV | | | CCACAGGTGTACACCCTG |
| | AGACAAAGCCGCGGGAGGAGCAGTA | HNAKTKPREEQYNSTYRVVSVL | | | CCCCCATCCCGGGATGAG |
| | CAACAGCACGTACCGTGTGGTCAGC | TVLHQDWLNGKEYKCKVSNKAL | | | CTGACCAAGAACCAGGTC |
| | GTCCTCACCGTCCTGCACCAGGACT | PAPIEKTISKAKGQPREPQVYT | | | AGCCTGACCTGCCTGGTC |
| | GGCTGAATGGCAAGGAGTACAAGTG | LPPSRDELTKNQVSLTCLVKGF | | | AAAGGCTTCTATCCCAGC |
| | CAAGGTCTCCAACAAAGCCCTCCCA | YPSDIAVEWESNGQPENNYKTT | | | GACATCGCCGTGGAGTGG |
| | GCCCCCATCGAGAAAACCATCTCCA | PPVLDSDGSFFLYSKLTVDKSR | | | GAGAGCAATGGGCAGCCG |
| | AAGCCAAAGGGCAGCCCCGAGAACC | WQQGNVFSCSVMHEALHNHYTQ | | | GAGAACAACTACAAGACC |
| | ACAGGTGTACACCCTGCCCCCATCC | KSLSLSPGK | | | ACGCCTCCCGTGCTGGAC |
| | CGGGATGAGCTGACCAAGAACCAGG | | | | TCCGACGGCTCCTTCTTC |
| | TCAGCCTGACCTGCCTGGTCAAAGG | | | | TTATATTCAAAGCTCACC |
| | CTTCTATCCCAGCGACATCGCCGTG | | | | GTGGACAAGAGCAGGTGG |
| | GAGTGGGAGAGCAATGGGCAGCCGG | | | | CAGCAGGGGAACGTCTTC |
| | AGAACAACTACAAGACCACGCCTCC | | | | TCATGCTCCGTGATGCAT |
| | CGTGCTGGACTCCGACGGCTCCTTC | | | | GAGGCTCTGCACAACCAC |
| | TTCTTATATTCAAAGCTCACCGTGG | | | | TACACGCAGAAGAGCCTC |
| | ACAAGAGCAGGTGGCAGCAGGGGAA | | | | TCCCTGTCTCCCGGG |
| | CGTCTTCTCATGCTCCGTGATGCAT | | | | (Nucleotides 415 |
| | GAGGCTCTGCACAACCACTACACGC | | | | to 1401 of SEQ ID |
| | AGAAGAGCCTCTCCCTGTCTCCCGG | | | | NO: 378) |
| | GAAATGA | | | | [SEQ ID NO: 385] |
| | Without leader [SEQ ID | | | | ASTKGPSVFPLAPSSKST |
| | NO: 379]: | | | | SGGTAALGCLVKDYFPEP |
| | GAAGTGCAGCTGCTGGAATCTGGCG | | | | VTVSWNSGALTSGVHTFP |
| | GCGGACTGGTGCAGCCTGGCGGCTC | | | | AVLQSSGLYSLSSVVTVP |
| | TCTGAGACTGTCTTGTGCCGCCTCC | | | | SSSLGTQTYICNVNHKPS |
| | GGCTACACCTTCACCACCTACTGGA | | | | NTKVDKKVEPKSCDKTHT |
| | TCACCTGGGTCCGACAGGCTCCCGG | | | | CPPCPAPELLGGPSVFLF |
| | CAAGGGACTGGAATGGGTGTCCGAC | | | | PPKPKDTLMISRTPEVTC |
| | ATCTACCCCGGCTCCTCCATCTCCA | | | | VVVDVSHEDPEVKFNWYV |
| | ACTACGCCGACTCCGTCAAGGGCCG | | | | DGVEVHNAKTKPREEQYN |
| | GTTCACCATCTCCCGGGACAACTCC | | | | STYRVVSVLTVLHQDWLN |
| | AAGAACACCCTGTACCTCCAGATGA | | | | GKEYKCKVSNKALPAPIE |
| | ACTCCCTGCGGGCCGAGGACACCGC | | | | KTISKAKGQPREPQVYTL |
| | CGTGTACTACTGCGCCAGAGAGGAC | | | | PPSRDELTKNQVSLTCLV |
| | GGCTACGACGCTTGGTTTGCCTACT | | | | KGFYPSDIAVEWESNGQP |
| | GGGGCCAGGGCACCCTGGTCACCGT | | | | ENNYKTTPPVLDSDGSFF |
| | GTCATCTGCCTCCACCAAGGGCCCA | | | | LYSKLTVDKSRWQQGNVF |
| | TCGGTCTTCCCCCTGGCACCCTCCT | | | | SCSVMHEALHNHYTQKSL |
| | CCAAGAGCACCTCTGGGGGCACAGC | | | | SLSPGK |
| | GGCCCTGGGCTGCCTGGTCAAGGAC | | | | [SEQ ID NO: 386] |
| | TACTTCCCCGAACCGGTGACGGTGT | | | | |
| | CGTGGAACTCAGGCGCCCTGACCAG | | | | |
| | CGGCGTGCACACCTTCCCGGCTGTC | | | | |
| | CTACAGTCCTCAGGACTCTACTCCC | | | | |
| | TCAGCAGCGTGGTGACCGTGCCCTC | | | | |
| | CAGCAGCTTGGGCACCCAGACCTAC | | | | |
| | ATCTGCAACGTGAATCACAAGCCCA | | | | |
| | GCAACACCAAGGTGGACAAGAAAGT | | | | |
| | TGAGCCCAAATCTTGTGACAAAACT | | | | |
| | CACACATGCCCACCGTGCCCAGCAC | | | | |
| | CTGAACTCCTGGGGGGACCGTCAGT | | | | |
| | CTTCCTCTTCCCCCCAAAACCCAAG | | | | |
| | GACACCCTCATGATCTCCCGGACCC | | | | |
| | CTGAGGTCACATGCGTGGTGGTGGA | | | | |
| | CGTGAGCCACGAAGACCCTGAGGTC | | | | |
| | AAGTTCAACTGGTACGTGGACGGCG | | | | |
| | TGGAGGTGCATAATGCCAAGACAAA | | | | |
| | GCCGCGGGAGGAGCAGTACAACAGC | | | | |
| | ACGTACCGTGTGGTCAGCGTCCTCA | | | | |
| | CCGTCCTGCACCAGGACTGGCTGAA | | | | |
| | TGGCAAGGAGTACAAGTGCAAGGTC | | | | |
| | TCCAACAAAGCCCTCCCAGCCCCCA | | | | |
| | TCGAGAAAACCATCTCCAAAGCCAA | | | | |
| | AGGGCAGCCCCGAGAACCACAGGTG | | | | |
| | TACACCCTGCCCCCATCCCGGGATG | | | | |
| | AGCTGACCAAGAACCAGGTCAGCCT | | | | |
| | GACCTGCCTGGTCAAAGGCTTCTAT | | | | |
| | CCCAGCGACATCGCCGTGGAGTGGG | | | | |
| | AGAGCAATGGGCAGCCGGAGAACAA | | | | |
| | CTACAAGACCACGCCTCCCGTGCTG | | | | |
| | GACTCCGACGGCTCCTTCTTCTTAT | | | | |
| | ATTCAAAGCTCACCGTGGACAAGAG | | | | |
| | CAGGTGGCAGCAGGGGAACGTCTTC | | | | |
| | TCATGCTCCGTGATGCATGAGGCTC | | | | |
| | TGCACAACCACTACACGCAGAAGAG | | | | |
| | CCTCTCCCTGTCTCCCGGGAAATGA | | | | |
| 7G6- | With leader [SEQ ID NO: | With leader [SEQ ID | ATGGGCTG | GAAGTGCAGCTGCTGGAA | GCCTCCACCAAGGGCCCA |
| HCzu24 | 387]: | NO: 389]: | GTCCTGCA | TCTGGCGGCGGACTGGTG | TCGGTCTTCCCCCTGGCA |
| | ATGGGCTGGTCCTGCATCATCCTGT | MGWSCIILFLVATATGVHSEVQ | TCATCCTG | CAGCCTGGCGGCTCTCTG | CCCTCCTCCAAGAGCACC |
| | TTCTGGTGGCCACCGCCACCGGCGT | LLESGGGLVQPGGSLRLSCAAS | TTTCTGGT | AGACTGTCTTGTGCCGCC | TCTGGGGGCACAGCGGCC |
| | GCACAGCGAAGTGCAGCTGCTGGAA | GYTFTTYWITWVRQAPGKGLEW | GGCCACCG | TCCGGCTACACCTTCACC | CTGGGCTGCCTGGTCAAG |
| | TCTGGCGGCGGACTGGTGCAGCCTG | VSDIYPGSSISNYNEKFKSRFT | CCACCGGC | ACCTACTGGATCACCTGG | GACTACTTCCCCGAACCG |
| | GCGGCTCTCTGAGACTGTCTTGTGC | ISRDNSKNTLYLQMNSLRAEDT | GTGCACAG | GTCCGACAGGCTCCCGGC | GTGACGGTGTCGTGGAAC |
| | CGCCTCCGGCTACACCTTCACCACC | AVYYCAREDGYDAWFAYWGQGT | C | AAGGGACTGGAATGGGTG | TCAGGCGCCCTGACCAGC |
| | TACTGGATCACCTGGGTCCGACAGG | LVTVSSASTKGPSVFPLAPSSK | (Nucleo- | TCCGACATCTACCCCGGC | GGCGTGCACACCTTCCCG |
| | CTCCCGGCAAGGGACTGGAATGGGT | STSGGTAALGCLVKDYFPEPVT | tides 1 | TCCTCCATCTCCAACTAC | GCTGTCCTACAGTCCTCA |
| | GTCCGACATCTACCCCGGCTCCTCC | VSWNSGALTSGVHTFPAVLQSS | to 57 of | AACGAGAAGTTCAAGTCC | GGACTCTACTCCCTCAGC |
| | ATCTCCAACTACAACGAGAAGTTCA | GLYSLSSVVTVPSSSLGTQTYI | SEQ ID | CGGTTCACCATCTCCCGG | AGCGTGGTGACCGTGCCC |
| | AGTCCCGGTTCACCATCTCCCGGGA | CNVNHKPSNTKVDKKVEPKSCD | NO: 387) | GACAACTCCAAGAACACC | TCCAGCAGCTTGGGCACC |
| | CAACTCCAAGAACACCCTGTACCTC | KTHTCPPCPAPELLGGPSVFLF | [SEQ ID | CTGTACCTCCAGATGAAC | CAGACCTACATCTGCAAC |
| | CAGATGAACTCCCTGCGGGCCGAGG | PPKPKDTLMISRTPEVTCVVVD | NO: 391] | TCCCTGCGGGCCGAGGAC | GTGAATCACAAGCCCAGC |
| | ACACCGCCGTGTACTACTGCGCCAG | VSHEDPEVKFNWYVDGVEVHNA | | ACCGCCGTGTACTACTGC | AACACCAAGGTGGACAAG |
| | AGAGGACGGCTACGACGCTTGGTTT | KTKPREEQYNSTYRVVSVLTVL | | GCCAGAGAGGACGGCTAC | AAAGTTGAGCCCAAATCT |
| | GCCTACTGGGGCCAGGGCACCCTGG | HQDWLNGKEYKCKVSNKALPAP | | GACGCTTGGTTTGCCTAC | TGTGACAAAACTCACACA |
| | TCACCGTGTCATCTGCCTCCACCAA | IEKTISKAKGQPREPQVYTLPP | | TGGGGCCAGGGCACCCTG | TGCCCACCGTGCCCAGCA |
| | GGGCCCATCGGTCTTCCCCCTGGCA | SRDELTKNQVSLTCLVKGFYPS | | GTCACCGTGTCATCT | CCTGAACTCCTGGGGGGA |
| | CCCTCCTCCAAGAGCACCTCTGGGG | DIAVEWESNGQPENNYKTTPPV | | (Nucleotides 58 to | CCGTCAGTCTTCCTCTTC |
| | GCACAGCGGCCCTGGGCTGCCTGGT | LDSDGSFFLYSKLTVDKSRWQQ | | 414 of SEQ ID NO: | CCCCCAAAACCCAAGGAC |
| | CAAGGACTACTTCCCCGAACCGGTG | GNVFSCSVMHEALHNHYTQKSL | | 387) | ACCCTCATGATCTCCCGG |
| | ACGGTGTCGTGGAACTCAGGCGCCC | SLSPGK | | [SEQ ID NO: 392] | ACCCCTGAGGTCACATGC |
| | TGACCAGCGGCGTGCACACCTTCCC | Without leader [SEQ ID | | EVQLLESGGGLVQPGGSL | GTGGTGGTGGACGTGAGC |
| | GGCTGTCCTACAGTCCTCAGGACTC | NO: 390]: | | RLSCAASGYTFTTYWITW | CACGAAGACCCTGAGGTC |
| | TACTCCCTCAGCAGCGTGGTGACCG | EVQLLESGGGLVQPGGSLRLSC | | VRQAPGKGLEWVSDIYPG | AAGTTCAACTGGTACGTG |
| | TGCCCTCCAGCAGCTTGGGCACCCA | AASGYTFTTYWITWVRQAPGKG | | SSISNYNEKFKSRFTISR | GACGGCGTGGAGGTGCAT |
| | GACCTACATCTGCAACGTGAATCAC | LEWVSDIYPGSSISNYNEKFKS | | DNSKNTLYLQMNSLRAED | AATGCCAAGACAAAGCCG |
| | AAGCCCAGCAACACCAAGGTGGACA | RFTISRDNSKNTLYLQMNSLRA | | TAVYYCAREDGYDAWFAY | CGGGAGGAGCAGTACAAC |
| | AGAAAGTTGAGCCCAAATCTTGTGA | EDTAVYYCAREDGYDAWFAYWG | | WGQGTLVTVSS | AGCACGTACCGTGTGGTC |
| | CAAAACTCACACATGCCCACCGTGC | QGTLVTVSSASTKGPSVFPLAP | | [SEQ ID NO: 393] | AGCGTCCTCACCGTCCTG |
| | CCAGCACCTGAACTCCTGGGGGGAC | SSKSTSGGTAALGCLVKDYFPE | | | CACCAGGACTGGCTGAAT |
| | CGTCAGTCTTCCTCTTCCCCCCAAA | PVTVSWNSGALTSGVHTFPAVL | | | GGCAAGGAGTACAAGTGC |
| | ACCCAAGGACACCCTCATGATCTCC | QSSGLYSLSSVVTVPSSSLGTQ | | | AAGGTCTCCAACAAAGCC |
| | CGGACCCCTGAGGTCACATGCGTGG | TYICNVNHKPSNTKVDKKVEPK | | | CTCCCAGCCCCCATCGAG |
| | TGGTGGACGTGAGCCACGAAGACCC | SCDKTHTCPPCPAPELLGGPSV | | | AAAACCATCTCCAAAGCC |
| | TGAGGTCAAGTTCAACTGGTACGTG | FLFPPKPKDTLMISRTPEVTCV | | | AAAGGGCAGCCCCGAGAA |
| | GACGGCGTGGAGGTGCATAATGCCA | VVDVSHEDPEVKFNWYVDGVEV | | | CCACAGGTGTACACCCTG |
| | AGACAAAGCCGCGGGAGGAGCAGTA | HNAKTKPREEQYNSTYRVVSVL | | | CCCCCATCCCGGGATGAG |
| | CAACAGCACGTACCGTGTGGTCAGC | TVLHQDWLNGKEYKCKVSNKAL | | | CTGACCAAGAACCAGGTC |
| | GTCCTCACCGTCCTGCACCAGGACT | PAPIEKTISKAKGQPREPQVYT | | | AGCCTGACCTGCCTGGTC |
| | GGCTGAATGGCAAGGAGTACAAGTG | LPPSRDELTKNQVSLTCLVKGF | | | AAAGGCTTCTATCCCAGC |
| | CAAGGTCTCCAACAAAGCCCTCCCA | YPSDIAVEWESNGQPENNYKTT | | | GACATCGCCGTGGAGTGG |
| | GCCCCCATCGAGAAAACCATCTCCA | PPVLDSDGSFFLYSKLTVDKSR | | | GAGAGCAATGGGCAGCCG |
| | AAGCCAAAGGGCAGCCCCGAGAACC | WQQGNVFSCSVMHEALHNHYTQ | | | GAGAACAACTACAAGACC |
| | ACAGGTGTACACCCTGCCCCCATCC | KSLSLSPGK | | | ACGCCTCCCGTGCTGGAC |
| | CGGGATGAGCTGACCAAGAACCAGG | | | | TCCGACGGCTCCTTCTTC |
| | TCAGCCTGACCTGCCTGGTCAAAGG | | | | TTATATTCAAAGCTCACC |
| | CTTCTATCCCAGCGACATCGCCGTG | | | | GTGGACAAGAGCAGGTGG |
| | GAGTGGGAGAGCAATGGGCAGCCGG | | | | CAGCAGGGGAACGTCTTC |
| | AGAACAACTACAAGACCACGCCTCC | | | | TCATGCTCCGTGATGCAT |
| | CGTGCTGGACTCCGACGGCTCCTTC | | | | GAGGCTCTGCACAACCAC |
| | TTCTTATATTCAAAGCTCACCGTGG | | | | TACACGCAGAAGAGCCTC |
| | ACAAGAGCAGGTGGCAGCAGGGGAA | | | | TCCCTGTCTCCCGGGAAA |
| | CGTCTTCTCATGCTCCGTGATGCAT | | | | TGA |
| | GAGGCTCTGCACAACCACTACACGC | | | | (Nucleotides 415 |
| | AGAAGAGCCTCTCCCTGTCTCCCGG | | | | to 1401 of SEQ ID |
| | GAAATGA | | | | NO: 387) |
| | Without leader [SEQ ID | | | | [SEQ ID NO: 394] |
| | NO: 388]: | | | | ASTKGPSVFPLAPSSKST |
| | GAAGTGCAGCTGCTGGAATCTGGCG | | | | SGGTAALGCLVKDYFPEP |
| | GCGGACTGGTGCAGCCTGGCGGCTC | | | | VTVSWNSGALTSGVHTFP |
| | TCTGAGACTGTCTTGTGCCGCCTCC | | | | AVLQSSGLYSLSSVVTVP |
| | GGCTACACCTTCACCACCTACTGGA | | | | SSSLGTQTYICNVNHKPS |
| | TCACCTGGGTCCGACAGGCTCCCGG | | | | NTKVDKKVEPKSCDKTHT |
| | CAAGGGACTGGAATGGGTGTCCGAC | | | | CPPCPAPELLGGPSVFLF |
| | ATCTACCCCGGCTCCTCCATCTCCA | | | | PPKPKDTLMISRTPEVTC |
| | ACTACAACGAGAAGTTCAAGTCCCG | | | | VVVDVSHEDPEVKFNWYV |
| | GTTCACCATCTCCCGGGACAACTCC | | | | DGVEVHNAKTKPREEQYN |
| | AAGAACACCCTGTACCTCCAGATGA | | | | STYRVVSVLTVLHQDWLN |
| | ACTCCCTGCGGGCCGAGGACACCGC | | | | GKEYKCKVSNKALPAPIE |
| | CGTGTACTACTGCGCCAGAGAGGAC | | | | KTISKAKGQPREPQVYTL |
| | GGCTACGACGCTTGGTTTGCCTACT | | | | PPSRDELTKNQVSLTCLV |
| | GGGGCCAGGGCACCCTGGTCACCGT | | | | KGFYPSDIAVEWESNGQP |
| | GTCATCTGCCTCCACCAAGGGCCCA | | | | ENNYKTTPPVLDSDGSFF |
| | TCGGTCTTCCCCCTGGCACCCTCCT | | | | LYSKLTVDKSRWQQGNVF |
| | CCAAGAGCACCTCTGGGGGCACAGC | | | | SCSVMHEALHNHYTQKSL |
| | GGCCCTGGGCTGCCTGGTCAAGGAC | | | | SLSPGK |
| | TACTTCCCCGAACCGGTGACGGTGT | | | | [SEQ ID NO: 395] |
| | CGTGGAACTCAGGCGCCCTGACCAG | | | | |
| | CGGCGTGCACACCTTCCCGGCTGTC | | | | |
| | CTACAGTCCTCAGGACTCTACTCCC | | | | |
| | TCAGCAGCGTGGTGACCGTGCCCTC | | | | |
| | CAGCAGCTTGGGCACCCAGACCTAC | | | | |
| | ATCTGCAACGTGAATCACAAGCCCA | | | | |
| | GCAACACCAAGGTGGACAAGAAAGT | | | | |
| | TGAGCCCAAATCTTGTGACAAAACT | | | | |
| | CACACATGCCCACCGTGCCCAGCAC | | | | |
| | CTGAACTCCTGGGGGGACCGTCAGT | | | | |
| | CTTCCTCTTCCCCCCAAAACCCAAG | | | | |
| | GACACCCTCATGATCTCCCGGACCC | | | | |
| | CTGAGGTCACATGCGTGGTGGTGGA | | | | |
| | CGTGAGCCACGAAGACCCTGAGGTC | | | | |
| | AAGTTCAACTGGTACGTGGACGGCG | | | | |
| | TGGAGGTGCATAATGCCAAGACAAA | | | | |
| | GCCGCGGGAGGAGCAGTACAACAGC | | | | |
| | ACGTACCGTGTGGTCAGCGTCCTCA | | | | |
| | CCGTCCTGCACCAGGACTGGCTGAA | | | | |
| | TGGCAAGGAGTACAAGTGCAAGGTC | | | | |
| | TCCAACAAAGCCCTCCCAGCCCCCA | | | | |
| | TCGAGAAAACCATCTCCAAAGCCAA | | | | |
| | AGGGCAGCCCCGAGAACCACAGGTG | | | | |
| | TACACCCTGCCCCCATCCCGGGATG | | | | |
| | AGCTGACCAAGAACCAGGTCAGCCT | | | | |
| | GACCTGCCTGGTCAAAGGCTTCTAT | | | | |
| | CCCAGCGACATCGCCGTGGAGTGGG | | | | |
| | AGAGCAATGGGCAGCCGGAGAACAA | | | | |
| | CTACAAGACCACGCCTCCCGTGCTG | | | | |
| | GACTCCGACGGCTCCTTCTTCTTAT | | | | |
| | ATTCAAAGCTCACCGTGGACAAGAG | | | | |
| | CAGGTGGCAGCAGGGGAACGTCTTC | | | | |
| | TCATGCTCCGTGATGCATGAGGCTC | | | | |
| | TGCACAACCACTACACGCAGAAGAG | | | | |
| | CCTCTCCCTGTCTCCCGGGAAATGA | | | | |
| 7G6- | With leader [SEQ ID NO: | With leader [SEQ ID | ATGGGCTG | GAAGTGCAGCTGCTGGAA | GCATCCACCAAGGGCCCA |
| HCzu25 | 396]: | NO: 398]: | GTCCTGCA | TCTGGCGGCGGACTGGTG | TCGGTCTTCCCCCTGGCA |
| | ATGGGCTGGTCCTGCATCATCCTGT | MGWSCIILFLVATATGVHSEVQ | TCATCCTG | CAGCCTGGCGGCTCTCTG | CCCTCCTCCAAGAGCACC |
| | TTCTGGTGGCCACCGCCACCGGCGT | LLESGGGLVQPGGSLRLSCAAS | TTTCTGGT | AGACTGTCTTGTGCCGCC | TCTGGGGGCACAGCGGCC |
| | GCACAGCGAAGTGCAGCTGCTGGAA | GYTFTTYWITWVRQAPGKGLEW | GGCCACCG | TCCGGCTACACCTTCACC | CTGGGCTGCCTGGTCAAG |
| | TCTGGCGGCGGACTGGTGCAGCCTG | VSDIYPGSSISNYNEKFKSRFT | CCACCGGC | ACCTACTGGATCACCTGG | GACTACTTCCCCGAACCG |
| | GCGGCTCTCTGAGACTGTCTTGTGC | ISVDNSKNTLYLQMNSLRAEDT | GTGCACAG | GTCCGACAGGCTCCCGGC | GTGACGGTGTCGTGGAAC |
| | CGCCTCCGGCTACACCTTCACCACC | AVYYCAREDGYDAWFAYWGQGT | C | AAGGGACTGGAATGGGTC | TCAGGCGCCCTGACCAGC |
| | TACTGGATCACCTGGGTCCGACAGG | LVTVSSASTKGPSVFPLAPSSK | (Nucleo- | TCCGACATCTACCCCGGC | GGCGTGCACACCTTCCCG |
| | CTCCCGGCAAGGGACTGGAATGGGT | STSGGTAALGCLVKDYFPEPVT | tides 1 | TCCTCCATCTCCAACTAC | GCTGTCCTACAGTCCTCA |
| | CTCCGACATCTACCCCGGCTCCTCC | VSWNSGALTSGVHTFPAVLQSS | to 57 of | AACGAGAAGTTCAAGTCC | GGACTCTACTCCCTCAGC |
| | ATCTCCAACTACAACGAGAAGTTCA | GLYSLSSVVTVPSSSLGTQTYI | SEQ ID | CGGTTCACCATCTCCGTG | AGCGTGGTGACCGTGCCC |
| | AGTCCCGGTTCACCATCTCCGTGGA | CNVNHKPSNTKVDKKVEPKSCD | NO: 396) | GACAACTCCAAGAACACC | TCCAGCAGCTTGGGCACC |
| | CAACTCCAAGAACACCCTGTACCTC | KTHTCPPCPAPELLGGPSVFLF | [SEQ ID | CTGTACCTCCAGATGAAC | CAGACCTACATCTGCAAC |
| | CAGATGAACTCCCTGAGAGCCGAGG | PPKPKDTLMISRTPEVTCVVVD | NO: 400] | TCCCTGAGAGCCGAGGAC | GTGAATCACAAGCCCAGC |
| | ACACCGCCGTGTACTACTGCGCCAG | VSHEDPEVKFNWYVDGVEVHNA | | ACCGCCGTGTACTACTGC | AACACCAAGGTGGACAAG |
| | AGAGGACGGCTACGACGCTTGGTTT | KTKPREEQYNSTYRVVSVLTVL | | GCCAGAGAGGACGGCTAC | AAAGTTGAGCCCAAATCT |
| | GCTTACTGGGGCCAGGGCACCCTGG | HQDWLNGKEYKCKVSNKALPAP | | GACGCTTGGTTTGCTTAC | TGTGACAAAACTCACACA |
| | TCACCGTGTCATCTGCATCCACCAA | IEKTISKAKGQPREPQVYTLPP | | TGGGGCCAGGGCACCCTG | TGCCCACCGTGCCCAGCA |
| | GGGCCCATCGGTCTTCCCCCTGGCA | SRDELTKNQVSLTCLVKGFYPS | | GTCACCGTGTCATCT | CCTGAACTCCTGGGGGGA |
| | CCCTCCTCCAAGAGCACCTCTGGGG | DIAVEWESNGQPENNYKTTPPV | | (Nucleotides 58 to | CCGTCAGTCTTCCTCTTC |
| | GCACAGCGGCCCTGGGCTGCCTGGT | LDSDGSFFLYSKLTVDKSRWQQ | | 414 of SEQ ID NO: | CCCCCAAAACCCAAGGAC |
| | CAAGGACTACTTCCCCGAACCGGTG | GNVFSCSVMHEALHNHYTQKSL | | 396) | ACCCTCATGATCTCCCGG |
| | ACGGTGTCGTGGAACTCAGGCGCCC | SLSPGK | | [SEQ ID NO: 401] | ACCCCTGAGGTCACATGC |
| | TGACCAGCGGCGTGCACACCTTCCC | Without leader [SEQ ID | | EVQLLESGGGLVQPGGSL | GTGGTGGTGGACGTGAGC |
| | GGCTGTCCTACAGTCCTCAGGACTC | NO: 399]: | | RLSCAASGYTFTTYWITW | CACGAAGACCCTGAGGTC |
| | TACTCCCTCAGCAGCGTGGTGACCG | EVQLLESGGGLVQPGGSLRLSC | | VRQAPGKGLEWVSDIYPG | AAGTTCAACTGGTACGTG |
| | TGCCCTCCAGCAGCTTGGGCACCCA | AASGYTFTTYWITWVRQAPGKG | | SSISNYNEKFKSRFTISV | GACGGCGTGGAGGTGCAT |
| | GACCTACATCTGCAACGTGAATCAC | LEWVSDIYPGSSISNYNEKFKS | | DNSKNTLYLQMNSLRAED | AATGCCAAGACAAAGCCG |
| | AAGCCCAGCAACACCAAGGTGGACA | RFTISVDNSKNTLYLQMNSLRA | | TAVYYCAREDGYDAWFAY | CGGGAGGAGCAGTACAAC |
| | AGAAAGTTGAGCCCAAATCTTGTGA | EDTAVYYCAREDGYDAWFAYWG | | WGQGTLVTVSS | AGCACGTACCGTGTGGTC |
| | CAAAACTCACACATGCCCACCGTGC | QGTLVTVSSASTKGPSVFPLAP | | [SEQ ID NO: 402] | AGCGTCCTCACCGTCCTG |
| | CCAGCACCTGAACTCCTGGGGGGAC | SSKSTSGGTAALGCLVKDYFPE | | | CACCAGGACTGGCTGAAT |
| | CGTCAGTCTTCCTCTTCCCCCCAAA | PVTVSWNSGALTSGVHTFPAVL | | | GGCAAGGAGTACAAGTGC |
| | ACCCAAGGACACCCTCATGATCTCC | QSSGLYSLSSVVTVPSSSLGTQ | | | AAGGTCTCCAACAAAGCC |
| | CGGACCCCTGAGGTCACATGCGTGG | TYICNVNHKPSNTKVDKKVEPK | | | CTCCCAGCCCCCATCGAG |
| | TGGTGGACGTGAGCCACGAAGACCC | SCDKTHTCPPCPAPELLGGPSV | | | AAAACCATCTCCAAAGCC |
| | TGAGGTCAAGTTCAACTGGTACGTG | FLFPPKPKDTLMISRTPEVTCV | | | AAAGGGCAGCCCCGAGAA |
| | GACGGCGTGGAGGTGCATAATGCCA | VVDVSHEDPEVKFNWYVDGVEV | | | CCACAGGTGTACACCCTG |
| | AGACAAAGCCGCGGGAGGAGCAGTA | HNAKTKPREEQYNSTYRVVSVL | | | CCCCCATCCCGGGATGAG |
| | CAACAGCACGTACCGTGTGGTCAGC | TVLHQDWLNGKEYKCKVSNKAL | | | CTGACCAAGAACCAGGTC |
| | GTCCTCACCGTCCTGCACCAGGACT | PAPIEKTISKAKGQPREPQVYT | | | AGCCTGACCTGCCTGGTC |
| | GGCTGAATGGCAAGGAGTACAAGTG | LPPSRDELTKNQVSLTCLVKGF | | | AAAGGCTTCTATCCCAGC |
| | CAAGGTCTCCAACAAAGCCCTCCCA | YPSDIAVEWESNGQPENNYKTT | | | GACATCGCCGTGGAGTGG |
| | GCCCCCATCGAGAAAACCATCTCCA | PPVLDSDGSFFLYSKLTVDKSR | | | GAGAGCAATGGGCAGCCG |
| | AAGCCAAAGGGCAGCCCCGAGAACC | WQQGNVFSCSVMHEALHNHYTQ | | | GAGAACAACTACAAGACC |
| | ACAGGTGTACACCCTGCCCCCATCC | KSLSLSPGK | | | ACGCCTCCCGTGCTGGAC |
| | CGGGATGAGCTGACCAAGAACCAGG | | | | TCCGACGGCTCCTTCTTC |
| | TCAGCCTGACCTGCCTGGTCAAAGG | | | | TTATATTCAAAGCTCACC |
| | CTTCTATCCCAGCGACATCGCCGTG | | | | GTGGACAAGAGCAGGTGG |
| | GAGTGGGAGAGCAATGGGCAGCCGG | | | | CAGCAGGGGAACGTCTTC |
| | AGAACAACTACAAGACCACGCCTCC | | | | TCATGCTCCGTGATGCAT |
| | CGTGCTGGACTCCGACGGCTCCTTC | | | | GAGGCTCTGCACAACCAC |
| | TTCTTATATTCAAAGCTCACCGTGG | | | | TACACGCAGAAGAGCCTC |
| | ACAAGAGCAGGTGGCAGCAGGGGAA | | | | TCCCTGTCTCCCGGGAAA |
| | CGTCTTCTCATGCTCCGTGATGCAT | | | | TGA |
| | GAGGCTCTGCACAACCACTACACGC | | | | (Nucleotides 415 |
| | AGAAGAGCCTCTCCCTGTCTCCCGG | | | | to 1401 of SEQ ID |
| | GAAATGA | | | | NO: 396) [SEQ ID |
| | Without leader [SEQ ID | | | | NO: 403] |
| | NO: 397]: | | | | ASTKGPSVFPLAPSSKST |
| | GAAGTGCAGCTGCTGGAATCTGGCG | | | | SGGTAALGCLVKDYFPEP |
| | GCGGACTGGTGCAGCCTGGCGGCTC | | | | VTVSWNSGALTSGVHTFP |
| | TCTGAGACTGTCTTGTGCCGCCTCC | | | | AVLQSSGLYSLSSVVTVP |
| | GGCTACACCTTCACCACCTACTGGA | | | | SSSLGTQTYICNVNHKPS |
| | TCACCTGGGTCCGACAGGCTCCCGG | | | | NTKVDKKVEPKSCDKTHT |
| | CAAGGGACTGGAATGGGTCTCCGAC | | | | CPPCPAPELLGGPSVFLF |
| | ATCTACCCCGGCTCCTCCATCTCCA | | | | PPKPKDTLMISRTPEVTC |
| | ACTACAACGAGAAGTTCAAGTCCCG | | | | VVVDVSHEDPEVKFNWYV |
| | GTTCACCATCTCCGTGGACAACTCC | | | | DGVEVHNAKTKPREEQYN |
| | AAGAACACCCTGTACCTCCAGATGA | | | | STYRVVSVLTVLHQDWLN |
| | ACTCCCTGAGAGCCGAGGACACCGC | | | | GKEYKCKVSNKALPAPIE |
| | CGTGTACTACTGCGCCAGAGAGGAC | | | | KTISKAKGQPREPQVYTL |
| | GGCTACGACGCTTGGTTTGCTTACT | | | | PPSRDELTKNQVSLTCLV |
| | GGGGCCAGGGCACCCTGGTCACCGT | | | | KGFYPSDIAVEWESNGQP |
| | GTCATCTGCATCCACCAAGGGCCCA | | | | ENNYKTTPPVLDSDGSFF |
| | TCGGTCTTCCCCCTGGCACCCTCCT | | | | LYSKLTVDKSRWQQGNVF |
| | CCAAGAGCACCTCTGGGGGCACAGC | | | | SCSVMHEALHNHYTQKSL |
| | GGCCCTGGGCTGCCTGGTCAAGGAC | | | | SLSPGK |
| | TACTTCCCCGAACCGGTGACGGTGT | | | | [SEQ ID NO: 404] |
| | CGTGGAACTCAGGCGCCCTGACCAG | | | | |
| | CGGCGTGCACACCTTCCCGGCTGTC | | | | |
| | CTACAGTCCTCAGGACTCTACTCCC | | | | |
| | TCAGCAGCGTGGTGACCGTGCCCTC | | | | |
| | CAGCAGCTTGGGCACCCAGACCTAC | | | | |
| | ATCTGCAACGTGAATCACAAGCCCA | | | | |
| | GCAACACCAAGGTGGACAAGAAAGT | | | | |
| | TGAGCCCAAATCTTGTGACAAAACT | | | | |
| | CACACATGCCCACCGTGCCCAGCAC | | | | |
| | CTGAACTCCTGGGGGGACCGTCAGT | | | | |
| | CTTCCTCTTCCCCCCAAAACCCAAG | | | | |
| | GACACCCTCATGATCTCCCGGACCC | | | | |
| | CTGAGGTCACATGCGTGGTGGTGGA | | | | |
| | CGTGAGCCACGAAGACCCTGAGGTC | | | | |
| | AAGTTCAACTGGTACGTGGACGGCG | | | | |
| | TGGAGGTGCATAATGCCAAGACAAA | | | | |
| | GCCGCGGGAGGAGCAGTACAACAGC | | | | |
| | ACGTACCGTGTGGTCAGCGTCCTCA | | | | |
| | CCGTCCTGCACCAGGACTGGCTGAA | | | | |
| | TGGCAAGGAGTACAAGTGCAAGGTC | | | | |
| | TCCAACAAAGCCCTCCCAGCCCCCA | | | | |
| | TCGAGAAAACCATCTCCAAAGCCAA | | | | |
| | AGGGCAGCCCCGAGAACCACAGGTG | | | | |
| | TACACCCTGCCCCCATCCCGGGATG | | | | |
| | AGCTGACCAAGAACCAGGTCAGCCT | | | | |
| | GACCTGCCTGGTCAAAGGCTTCTAT | | | | |
| | CCCAGCGACATCGCCGTGGAGTGGG | | | | |
| | AGAGCAATGGGCAGCCGGAGAACAA | | | | |
| | CTACAAGACCACGCCTCCCGTGCTG | | | | |
| | GACTCCGACGGCTCCTTCTTCTTAT | | | | |
| | ATTCAAAGCTCACCGTGGACAAGAG | | | | |
| | CAGGTGGCAGCAGGGGAACGTCTTC | | | | |
| | TCATGCTCCGTGATGCATGAGGCTC | | | | |
| | TGCACAACCACTACACGCAGAAGAG | | | | |
| | CCTCTCCCTGTCTCCCGG | | | | |
| | GAAATGA | | | | |

7G6 VL sequences

| Clone | | | | | |
|---|---|---|---|---|---|
| Name | | | | | |
| (Species | | | CDNA | Variable Domain | Constant Domain |
| & | Light Chain | Light Chain | Position | (cDNA) | (cDNA) |
| Isotype) | DNA Sequence | Amino Acid Sequence | Leader | (amino acid) | (amino acid) |
| mouse | With leader [SEQ ID NO: | With leader [SEQ ID | ATGAAGTT | GATGTTTTGATGACCCAA | CGGGCTGATGCTGCACCA |
| 7G6- | 405]: | NO: 407]: | GCCTGTTA | ACTCCACTCTCCCTGCCT | ACTGTATCCATCTTCCCA |
| V_{K} | ATGAAGTTGCCTGTTAGGCTGTTGG | MKLPVRLLVMMFWIPASSSDVL | GGCTGTTG | GTCAGTCTTGGAGATCAA | CCTTC |
| | TGATGATGTTCTGGATTCCTGCTTC | MTQTPLSLPVSLGDQASISCRS | GTGATGAT | GCCTCCATCTCTTGCAGA | (nucleotides 394 |
| | CAGCAGTGATGTTTTGATGACCCAA | SQSILHSNGNTYLEWYLQKPGQ | GTTCTGGA | TCTAGTCAGAGCATTTTA | to 434 of SEQ ID |
| | ACTCCACTCTCCCTGCCTGTCAGTC | SPKLLICKVSNRFSGVPDRFSG | TTCCTGCT | CATAGTAATGGAAACACC | NO: 405) |
| | TTGGAGATCAAGCCTCCATCTCTTG | SGSGTDFTLKISRVEAEDLGVY | TCCAGCAG | TATTTAGAATGGTACCTG | [SEQ ID NO: 412] |
| | CAGATCTAGTCAGAGCATTTTACAT | YCFQGSHVPFTFGSGTKLEIKR | T | CAGAAACCAGGCCAGTCT | KRADAAPTVSIFPPS |
| | AGTAATGGAAACACCTATTTAGAAT | ADAAPTVSIFPPS | (nucleo- | CCAAAGCTCCTGATTTGC | [SEQ ID NO: 413] |
| | GGTACCTGCAGAAACCAGGCCAGTC | Without leader [SEQ ID | tides 1 | AAAGTTTCCAACCGATTT | |
| | TCCAAAGCTCCTGATTTGCAAAGTT | O: 408]: | to 57 of | TCTGGGGTCCCAGACAGG | |
| | TCCAACCGATTTTCTGGGGTCCCAG | DVLMTQTPLSLPVSLGDQASIS | SEQ ID | TTCAGTGGCAGTGGATCA | |
| | ACAGGTTCAGTGGCAGTGGATCAGG | CRSSQSILHSNGNTYLEWYLQK | NO: 405) | GGGACAGATTTCACACTC | |
| | GACAGATTTCACACTCAAGATCAGC | PGQSPKLLICKVSNRFSGVPDR | [SEQ ID | AAGATCAGCAGAGTGGAG | |
| | AGAGTGGAGGCTGAGGATCTGGGAG | FSGSGSGTDFTLKISRVEAEDL | NO: 409] | GCTGAGGATCTGGGAGTT | |
| | TTTATTACTGCTTTCAAGGTTCACA | GVYYCFQGSHVPFTFGSGTKLE | | TATTACTGCTTTCAAGGT | |
| | TGTTCCATTCACGTTCGGCTCGGGG | IKRADAAPTVSIFPPS | | TCACATGTTCCATTCACG | |
| | ACAAAGTTGGAAATAAAACGGGCTG | | | TTCGGCTCGGGGACAAAG | |
| | ATGCTGCACCAACTGTATCCATCTT | | | TTGGAAATAAAA | |
| | CCCACCTTC | | | (nucleotides 58 to | |
| | Without leader [SEQ ID | | | 393 of SEQ ID NO: | |
| | NO: 406]: | | | 405) | |
| | GATGTTTTGATGACCCAAACTCCAC | | | [SEQ ID NO: 410] | |
| | TCTCCCTGCCTGTCAGTCTTGGAGA | | | DVLMTQTPLSLPVSLGDQ | |
| | TCAAGCCTCCATCTCTTGCAGATCT | | | ASISCRSSQSILHSNGNT | |
| | AGTCAGAGCATTTTACATAGTAATG | | | YLEWYLQKPGQSPKLLIC | |
| | GAAACACCTATTTAGAATGGTACCT | | | KVSNRFSGVPDRFSGSGS | |
| | GCAGAAACCAGGCCAGTCTCCAAAG | | | GTDFTLKISRVEAEDLGV | |
| | CTCCTGATTTGCAAAGTTTCCAACC | | | YYCFQGSHVPFTFGSGTK | |
| | GATTTTCTGGGGTCCCAGACAGGTT | | | LEIK | |
| | CAGTGGCAGTGGATCAGGGACAGAT | | | [SEQ ID NO: 411] | |
| | TTCACACTCAAGATCAGCAGAGTGG | | | | |
| | AGGCTGAGGATCTGGGAGTTTATTA | | | | |
| | CTGCTTTCAAGGTTCACATGTTCCA | | | | |
| | TTCACGTTCGGCTCGGGGACAAAGT | | | | |
| | TGGAAATAAAACGGGCTGATGCTGC | | | | |
| | ACCAACTGTATCCATCTTCCCACCT | | | | |
| | TC | | | | |
| 7G6- | With leader [SEQ ID NO: | With leader [SEQ ID | ATGGGCTG | GACGTCGTGATGACACAG | CGAACTGTGGCTGCACCA |
| LCzu1 | 414]: | NO: 416]: | GTCCTGCA | TCCCCCCTGTCCCTGCCT | TCTGTCTTCATCTTCCCG |
| | ATGGGCTGGTCCTGCATCATCCTGT | MGWSCIILFLVATATGVHSDVV | TCATCCTG | GTGACCCTGGGACAGCCT | CCATCTGATGAGCAGTTG |
| | TTCTGGTGGCCACCGCCACCGGCGT | MTQSPLSLPVTLGQPASISCRS | TTTCTGGT | GCCTCCATCTCCTGCAGA | AAATCTGGAACTGCCTCT |
| | GCACAGCGACGTCGTGATGACACAG | SQSILHSNGNTYLEWFQQRPGQ | GGCCACCG | TCCTCCCAGTCCATCCTG | GTTGTGTGCCTGCTGAAT |
| | TCCCCCCTGTCCCTGCCTGTGACCC | SPRRLIYKVSNRFSGVPDRFSG | CCACCGGC | CACTCCAACGGCAACACC | AACTTCTATCCCAGAGAG |
| | TGGGACAGCCTGCCTCCATCTCCTG | SGSGTDFTLKISRVEAEDVGVY | GTGCACAG | TACCTGGAATGGTTCCAG | GCCAAAGTACAGTGGAAG |
| | CAGATCCTCCCAGTCCATCCTGCAC | YCFQGSHVPFTFGQGTKLEIKR | C | CAGCGGCCTGGCCAGTCT | GTGGATAACGCCCTCCAA |
| | TCCAACGGCAACACCTACCTGGAAT | TVAAPSVFIFPPSDEQLKSGTA | (nucleo- | CCCAGACGGCTGATCTAC | TCGGGTAACTCCCAGGAG |
| | GGTTCCAGCAGCGGCCTGGCCAGTC | SVVCLLNNFYPREAKVQWKVDN | tide 1 to | AAGGTGTCCAACCGGTTC | AGTGTCACAGAGCAGGAC |
| | TCCCAGACGGCTGATCTACAAGGTG | ALQSGNSQESVTEQDSKDSTYS | 57 of | TCCGGCGTGCCCGACAGA | AGCAAGGACAGCACCTAC |
| | TCCAACCGGTTCTCCGGCGTGCCCG | LSSTLTLSKADYEKHKVYACEV | SEQ ID | TTCTCCGGCTCTGGCTCT | AGCCTCAGCAGCACCCTG |
| | ACAGATTCTCCGGCTCTGGCTCTGG | THQGLSSPVTKSFNRGEC | NO: 414) | GGCACCGACTTCACCCTG | ACGCTGAGCAAAGCAGAC |
| | CACCGACTTCACCCTGAAGATCTCC | Without leader [SEQ ID | [SEQ ID | AAGATCTCCCGGGTGGAA | TACGAGAAACACAAAGTC |
| | CGGGTGGAAGCCGAGGACGTGGGCG | NO: 417]: | NO: 418] | GCCGAGGACGTGGGCGTG | TACGCCTGCGAAGTCACC |
| | TGTACTACTGTTTTCAAGGCTCCCA | DVVMTQSPLSLPVTLGQPASIS | | TACTACTGTTTTCAAGGC | CATCAGGGCCTGAGCTCG |
| | CGTGCCCTTCACCTTCGGCCAGGGC | CRSSQSILHSNGNTYLEWFQQR | | TCCCACGTGCCCTTCACC | CCCGTCACAAAGAGCTTC |
| | ACCAAGCTGGAAATCAAACGAACTG | PGQSPRRLIYKVSNRFSGVPDR | | TTCGGCCAGGGCACCAAG | AACAGGGGAGAGTGT |
| | TGGCTGCACCATCTGTCTTCATCTT | FSGSGSGTDFTLKISRVEAEDV | | CTGGAAATCAAA | (nucleotide 394 to |
| | CCCGCCATCTGATGAGCAGTTGAAA | GVYYCFQGSHVPFTFGQGTKLE | | (nucleotide 58 to | 714 of SEQ ID NO: |
| | TCTGGAACTGCCTCTGTTGTGTGCC | IKRTVAAPSVFIFPPSDEQLKS | | 393 of SEQ ID NO: | 414) |
| | TGCTGAATAACTTCTATCCCAGAGA | GTASVVCLLNNFYPREAKVQWK | | 414) | [SEQ ID NO: 421] |
| | GGCCAAAGTACAGTGGAAGGTGGAT | VDNALQSGNSQESVTEQDSKDS | | [SEQ ID NO: 419] | RTVAAPSVFIFPPSDEQL |
| | AACGCCCTCCAATCGGGTAACTCCC | TYSLSSTLTLSKADYEKHKVYA | | DVVMTQSPLSLPVTLGQP | KSGTASVVCLLNNFYPRE |
| | AGGAGAGTGTCACAGAGCAGGACAG | CEVTHQGLSSPVTKSFNRGEC | | ASISCRSSQSILHSNGNT | AKVQWKVDNALQSGNSQE |
| | CAAGGACAGCACCTACAGCCTCAGC | | | YLEWFQQRPGQSPRRLIY | SVTEQDSKDSTYSLSSTL |
| | AGCACCCTGACGCTGAGCAAAGCAG | | | KVSNRFSGVPDRFSGSGS | TLSKADYEKHKVYACEVT |
| | ACTACGAGAAACACAAAGTCTACGC | | | GTDFTLKISRVEAEDVGV | HQGLSSPVTKSFNRGEC |
| | CTGCGAAGTCACCCATCAGGGCCTG | | | YYCFQGSHVPFTFGQGTK | [SEQ ID NO: 422] |
| | AGCTCGCCCGTCACAAAGAGCTTCA | | | LEIK | |
| | ACAGGGGAGAGTGTTGA | | | [SEQ ID NO: 420] | |
| | Without leader [SEQ ID | | | | |
| | NO: 415]: | | | | |
| | GACGTCGTGATGACACAGTCCCCCC | | | | |
| | TGTCCCTGCCTGTGACCCTGGGACA | | | | |
| | GCCTGCCTCCATCTCCTGCAGATCC | | | | |
| | TCCCAGTCCATCCTGCACTCCAACG | | | | |
| | GCAACACCTACCTGGAATGGTTCCA | | | | |
| | GCAGCGGCCTGGCCAGTCTCCCAGA | | | | |
| | CGGCTGATCTACAAGGTGTCCAACC | | | | |
| | GGTTCTCCGGCGTGCCCGACAGATT | | | | |
| | CTCCGGCTCTGGCTCTGGCACCGAC | | | | |
| | TTCACCCTGAAGATCTCCCGGGTGG | | | | |
| | AAGCCGAGGACGTGGGCGTGTACTA | | | | |
| | CTGTTTTCAAGGCTCCCACGTGCCC | | | | |
| | TTCACCTTCGGCCAGGGCACCAAGC | | | | |
| | TGGAAATCAAACGAACTGTGGCTGC | | | | |
| | ACCATCTGTCTTCATCTTCCCGCCA | | | | |
| | TCTGATGAGCAGTTGAAATCTGGAA | | | | |
| | CTGCCTCTGTTGTGTGCCTGCTGAA | | | | |
| | TAACTTCTATCCCAGAGAGGCCAAA | | | | |
| | GTACAGTGGAAGGTGGATAACGCCC | | | | |
| | TCCAATCGGGTAACTCCCAGGAGAG | | | | |
| | TGTCACAGAGCAGGACAGCAAGGAC | | | | |
| | AGCACCTACAGCCTCAGCAGCACCC | | | | |
| | TGACGCTGAGCAAAGCAGACTACGA | | | | |
| | GAAACACAAAGTCTACGCCTGCGAA | | | | |
| | GTCACCCATCAGGGCCTGAGCTCGC | | | | |
| | CCGTCACAAAGAGCTTCAACAGGGG | | | | |
| | AGAGTGTTGA | | | | |
| 7G6- | With leader [SEQ ID NO: | With leader [SEQ ID | ATGGGCTG | GACGTCGTGATGACACAG | CGAACTGTGGCTGCACCA |
| LCzu2 | 423]: | NO: 425]: | GTCCTGCA | TCCCCCCTGTCCCTGCCT | TCTGTCTTCATCTTCCCG |
| | ATGGGCTGGTCCTGCATCATCCTGT | MGWSCIILFLVATATGVHSDVV | TCATCCTG | GTGACCCTGGGACAGCCT | CCATCTGATGAGCAGTTG |
| | TTCTGGTGGCCACCGCCACCGGCGT | MTQSPLSLPVTLGQPASISCRS | TTTCTGGT | GCCTCCATCTCCTGCAGA | AAATCTGGAACTGCCTCT |
| | GCACAGCGACGTCGTGATGACACAG | SQSILHSNGNTYLEWYQQRPGQ | GGCCACCG | TCCTCCCAGTCCATCCTG | GTTGTGTGCCTGCTGAAT |
| | TCCCCCCTGTCCCTGCCTGTGACCC | SPRLLICKVSNRFSGVPDRFSG | CCACCGGC | CACTCCAACGGCAACACC | AACTTCTATCCCAGAGAG |
| | TGGGACAGCCTGCCTCCATCTCCTG | SGSGTDFTLKISRVEAEDVGVY | GTGCACAG | TACCTGGAATGGTATCAG | GCCAAAGTACAGTGGAAG |
| | CAGATCCTCCCAGTCCATCCTGCAC | YCFQGSHVPFTFGQGTKLEIKR | C | CAGCGGCCTGGCCAGTCT | GTGGATAACGCCCTCCAA |
| | TCCAACGGCAACACCTACCTGGAAT | TVAAPSVFIFPPSDEQLKSGTA | (Nucleo- | CCCAGACTGCTGATCTGC | TCGGGTAACTCCCAGGAG |
| | GGTATCAGCAGCGGCCTGGCCAGTC | SVVCLLNNFYPREAKVQWKVDN | tides 1 | AAGGTGTCCAACCGGTTC | AGTGTCACAGAGCAGGAC |
| | TCCCAGACTGCTGATCTGCAAGGTG | ALQSGNSQESVTEQDSKDSTYS | to 57 of | TCCGGCGTGCCCGACAGA | AGCAAGGACAGCACCTAC |
| | TCCAACCGGTTCTCCGGCGTGCCCG | LSSTLTLSKADYEKHKVYACEV | SEQ ID | TTCTCCGGCTCTGGCTCT | AGCCTCAGCAGCACCCTG |
| | ACAGATTCTCCGGCTCTGGCTCTGG | THQGLSSPVTKSFNRGEC | NO: | GGCACCGACTTCACCCTG | ACGCTGAGCAAAGCAGAC |
| | CACCGACTTCACCCTGAAGATCTCC | Without leader [SEQ ID | 423) | AAGATCTCCCGGGTGGAA | TACGAGAAACACAAAGTC |
| | CGGGTGGAAGCCGAGGACGTGGGCG | NO: 426]: | [SEQ ID | GCCGAGGACGTGGGCGTG | TACGCCTGCGAAGTCACC |
| | TGTACTACTGTTTTCAAGGCTCCCA | DVVMTQSPLSLPVTLGQPASIS | NO: 427] | TACTACTGTTTTCAAGGC | CATCAGGGCCTGAGCTCG |
| | CGTGCCCTTCACCTTCGGCCAGGGC | CRSSQSILHSNGNTYLEWYQQR | | TCCCACGTGCCCTTCACC | CCCGTCACAAAGAGCTTC |
| | ACCAAGCTGGAAATCAAACGAACTG | PGQSPRLLICKVSNRFSGVPDR | | TTCGGCCAGGGCACCAAG | AACAGGGGAGAGTGT |
| | TGGCTGCACCATCTGTCTTCATCTT | FSGSGSGTDFTLKISRVEAEDV | | CTGGAAATCAAA | (Nucleotides 394 |
| | CCCGCCATCTGATGAGCAGTTGAAA | GVYYCFQGSHVPFTFGQGTKLE | | (nucleotides 58 to | to 714 of SEQ ID |
| | TCTGGAACTGCCTCTGTTGTGTGCC | IKRTVAAPSVFIFPPSDEQLKS | | 393 of SEQ ID NO: | NO: 423) |
| | TGCTGAATAACTTCTATCCCAGAGA | GTASVVCLLNNFYPREAKVQWK | | 423) | [SEQ ID NO: 430] |
| | GGCCAAAGTACAGTGGAAGGTGGAT | VDNALQSGNSQESVTEQDSKDS | | [SEQ ID NO: 428] | RTVAAPSVFIFPPSDEQL |
| | AACGCCCTCCAATCGGGTAACTCCC | TYSLSSTLTLSKADYEKHKVYA | | DVVMTQSPLSLPVTLGQP | KSGTASVVCLLNNFYPRE |
| | AGGAGAGTGTCACAGAGCAGGACAG | CEVTHQGLSSPVTKSFNRGEC | | ASISCRSSQSILHSNGNT | AKVQWKVDNALQSGNSQE |
| | CAAGGACAGCACCTACAGCCTCAGC | | | YLEWYQQRPGQSPRLLIC | SVTEQDSKDSTYSLSSTL |
| | AGCACCCTGACGCTGAGCAAAGCAG | | | KVSNRFSGVPDRFSGSGS | TLSKADYEKHKVYACEVT |
| | ACTACGAGAAACACAAAGTCTACGC | | | GTDFTLKISRVEAEDVGV | HQGLSSPVTKSFNRGEC |
| | CTGCGAAGTCACCCATCAGGGCCTG | | | YYCFQGSHVPFTFGQGTK | [SEQ ID NO: 431] |
| | AGCTCGCCCGTCACAAAGAGCTTCA | | | LEIK | |
| | ACAGGGGAGAGTGTTGA | | | [SEQ ID NO: 429] | |
| | Without leader [SEQ ID | | | | |
| | NO: 424]: | | | | |
| | GACGTCGTGATGACACAGTCCCCCC | | | | |
| | TGTCCCTGCCTGTGACCCTGGGACA | | | | |
| | GCCTGCCTCCATCTCCTGCAGATCC | | | | |
| | TCCCAGTCCATCCTGCACTCCAACG | | | | |
| | GCAACACCTACCTGGAATGGTATCA | | | | |
| | GCAGCGGCCTGGCCAGTCTCCCAGA | | | | |
| | CTGCTGATCTGCAAGGTGTCCAACC | | | | |
| | GGTTCTCCGGCGTGCCCGACAGATT | | | | |
| | CTCCGGCTCTGGCTCTGGCACCGAC | | | | |
| | TTCACCCTGAAGATCTCCCGGGTGG | | | | |
| | AAGCCGAGGACGTGGGCGTGTACTA | | | | |
| | CTGTTTTCAAGGCTCCCACGTGCCC | | | | |
| | TTCACCTTCGGCCAGGGCACCAAGC | | | | |
| | TGGAAATCAAACGAACTGTGGCTGC | | | | |
| | ACCATCTGTCTTCATCTTCCCGCCA | | | | |
| | TCTGATGAGCAGTTGAAATCTGGAA | | | | |
| | CTGCCTCTGTTGTGTGCCTGCTGAA | | | | |
| | TAACTTCTATCCCAGAGAGGCCAAA | | | | |
| | GTACAGTGGAAGGTGGATAACGCCC | | | | |
| | TCCAATCGGGTAACTCCCAGGAGAG | | | | |
| | TGTCACAGAGCAGGACAGCAAGGAC | | | | |
| | AGCACCTACAGCCTCAGCAGCACCC | | | | |
| | TGACGCTGAGCAAAGCAGACTACGA | | | | |
| | GAAACACAAAGTCTACGCCTGCGAA | | | | |
| | GTCACCCATCAGGGCCTGAGCTCGC | | | | |
| | CCGTCACAAAGAGCTTCAACAGGGG | | | | |
| | AGAGTGTTGA | | | | |
| 7G6- | With leader [SEQ ID NO: | With leader [SEQ ID | ATGGGCTG | GACGTCGTGATGACACAG | CGAACTGTGGCTGCACCA |
| LCzu3 | 432]: | NO: 434]: | GTCCTGCA | TCCCCCCTGTCCCTGCCT | TCTGTCTTCATCTTCCCG |
| | ATGGGCTGGTCCTGCATCATCCTGT | MGWSCIILFLVATATGVHSDVV | TCATCCTG | GTGACCCTGGGACAGCCT | CCATCTGATGAGCAGTTG |
| | TTCTGGTGGCCACCGCCACCGGCGT | MTQSPLSLPVTLGQPASISCRS | TTTCTGGT | GCCTCCATCTCCTGCAGA | AAATCTGGAACTGCCTCT |
| | GCACAGCGACGTCGTGATGACACAG | SQSILHSNGNTYLEWFQQRPGQ | GGCCACCG | TCCTCCCAGTCCATCCTG | GTTGTGTGCCTGCTGAAT |
| | TCCCCCCTGTCCCTGCCTGTGACCC | SPRRLICKVSNRFSGVPDRFSG | CCACCGGC | CACTCCAACGGCAACACC | AACTTCTATCCCAGAGAG |
| | TGGGACAGCCTGCCTCCATCTCCTG | SGSGTDFTLKISRVEAEDVGVY | GTGCACAG | TACCTGGAATGGTTCCAG | GCCAAAGTACAGTGGAAG |
| | CAGATCCTCCCAGTCCATCCTGCAC | YCFQGSHVPFTFGQGTKLEIKR | C | CAGCGGCCTGGCCAGTCT | GTGGATAACGCCCTCCAA |
| | TCCAACGGCAACACCTACCTGGAAT | TVAAPSVFIFPPSDEQLKSGTA | (nucleo- | CCCCGTAGACTGATCTGC | TCGGGTAACTCCCAGGAG |
| | GGTTCCAGCAGCGGCCTGGCCAGTC | SVVCLLNNFYPREAKVQWKVDN | tides 1 | AAGGTGTCCAACCGGTTC | AGTGTCACAGAGCAGGAC |
| | TCCCCGTAGACTGATCTGCAAGGTG | ALQSGNSQESVTEQDSKDSTYS | to 57 of | TCCGGCGTGCCCGACAGA | AGCAAGGACAGCACCTAC |
| | TCCAACCGGTTCTCCGGCGTGCCCG | LSSTLTLSKADYEKHKVYACEV | SEQ ID | TTCTCCGGCTCTGGCTCT | AGCCTCAGCAGCACCCTG |
| | ACAGATTCTCCGGCTCTGGCTCTGG | THQGLSSPVTKSFNRGEC | NO: 432) | GGCACCGACTTCACCCTG | ACGCTGAGCAAAGCAGAC |
| | CACCGACTTCACCCTGAAGATCTCC | Without leader [SEQ ID | [SEQ ID | AAGATCTCCCGGGTGGAA | TACGAGAAACACAAAGTC |
| | CGGGTGGAAGCCGAGGACGTGGGCG | NO: 435]: | NO: 436] | GCCGAGGACGTGGGCGTG | TACGCCTGCGAAGTCACC |
| | TGTACTACTGTTTTCAAGGCTCCCA | DVVMTQSPLSLPVTLGQPASIS | | TACTACTGTTTTCAAGGC | CATCAGGGCCTGAGCTCG |
| | CGTGCCCTTCACCTTCGGCCAGGGC | CRSSQSILHSNGNTYLEWFQQR | | TCCCACGTGCCCTTCACC | CCCGTCACAAAGAGCTTC |
| | ACCAAGCTGGAAATCAAACGAACTG | PGQSPRRLICKVSNRFSGVPDR | | TTCGGCCAGGGCACCAAG | AACAGGGGAGAGTGT |
| | TGGCTGCACCATCTGTCTTCATCTT | FSGSGSGTDFTLKISRVEAEDV | | CTGGAAATCAAA | (nucleotides 394 |
| | CCCGCCATCTGATGAGCAGTTGAAA | GVYYCFQGSHVPFTFGQGTKLE | | (nucleotides 58 to | to 714 of SEQ ID |
| | TCTGGAACTGCCTCTGTTGTGTGCC | IKRTVAAPSVFIFPPSDEQLKS | | 393 of SEQ ID NO: | NO: 432) |
| | TGCTGAATAACTTCTATCCCAGAGA | GTASVVCLLNNFYPREAKVQWK | | 432) | [SEQ ID NO: 439] |
| | GGCCAAAGTACAGTGGAAGGTGGAT | VDNALQSGNSQESVTEQDSKDS | | [SEQ ID NO: 437] | RTVAAPSVFIFPPSDEQL |
| | AACGCCCTCCAATCGGGTAACTCCC | TYSLSSTLTLSKADYEKHKVYA | | DVVMTQSPLSLPVTLGQP | KSGTASVVCLLNNFYPRE |
| | AGGAGAGTGTCACAGAGCAGGACAG | CEVTHQGLSSPVTKSFNRGEC | | ASISCRSSQSILHSNGNT | AKVQWKVDNALQSGNSQE |
| | CAAGGACAGCACCTACAGCCTCAGC | | | YLEWFQQRPGQSPRRLIC | SVTEQDSKDSTYSLSSTL |
| | AGCACCCTGACGCTGAGCAAAGCAG | | | KVSNRFSGVPDRFSGSGS | TLSKADYEKHKVYACEVT |
| | ACTACGAGAAACACAAAGTCTACGC | | | GTDFTLKISRVEAEDVGV | HQGLSSPVTKSFNRGEC |
| | CTGCGAAGTCACCCATCAGGGCCTG | | | YYCFQGSHVPFTFGQGTK | [SEQ ID NO: 440] |
| | AGCTCGCCCGTCACAAAGAGCTTCA | | | LEIK | |
| | ACAGGGGAGAGTGTTGA | | | [SEQ ID NO: 438] | |
| | Without leader [SEQ ID | | | | |
| | NO: 433]: | | | | |
| | GACGTCGTGATGACACAGTCCCCCC | | | | |
| | TGTCCCTGCCTGTGACCCTGGGACA | | | | |
| | GCCTGCCTCCATCTCCTGCAGATCC | | | | |
| | TCCCAGTCCATCCTGCACTCCAACG | | | | |
| | GCAACACCTACCTGGAATGGTTCCA | | | | |
| | GCAGCGGCCTGGCCAGTCTCCCCGT | | | | |
| | AGACTGATCTGCAAGGTGTCCAACC | | | | |
| | GGTTCTCCGGCGTGCCCGACAGATT | | | | |
| | CTCCGGCTCTGGCTCTGGCACCGAC | | | | |
| | TTCACCCTGAAGATCTCCCGGGTGG | | | | |
| | AAGCCGAGGACGTGGGCGTGTACTA | | | | |
| | CTGTTTTCAAGGCTCCCACGTGCCC | | | | |
| | TTCACCTTCGGCCAGGGCACCAAGC | | | | |
| | TGGAAATCAAACGAACTGTGGCTGC | | | | |
| | ACCATCTGTCTTCATCTTCCCGCCA | | | | |
| | TCTGATGAGCAGTTGAAATCTGGAA | | | | |
| | CTGCCTCTGTTGTGTGCCTGCTGAA | | | | |
| | TAACTTCTATCCCAGAGAGGCCAAA | | | | |
| | GTACAGTGGAAGGTGGATAACGCCC | | | | |
| | TCCAATCGGGTAACTCCCAGGAGAG | | | | |
| | TGTCACAGAGCAGGACAGCAAGGAC | | | | |
| | AGCACCTACAGCCTCAGCAGCACCC | | | | |
| | TGACGCTGAGCAAAGCAGACTACGA | | | | |
| | GAAACACAAAGTCTACGCCTGCGAA | | | | |
| | GTCACCCATCAGGGCCTGAGCTCGC | | | | |
| | CCGTCACAAAGAGCTTCAACAGGGG | | | | |
| 7G6- | AGAGTGTTGA | With leader [SEQ ID | ATGGGCTG | GACGTCGTGATGACACAG | CGAACTGTGGCTGCACCA |
| LCzu4 | With leader [SEQ ID NO: | NO: 443]: | GTCCTGCA | TCCCCCCTGTCCCTGCCT | TCTGTCTTCATCTTCCCG |
| | 441]: | MGWSCIILFLVATATGVHSDVV | TCATCCTG | GTGACCCTGGGACAGCCT | CCATCTGATGAGCAGTTG |
| | ATGGGCTGGTCCTGCATCATCCTGT | MTQSPLSLPVTLGQPASISCRS | TTTCTGGT | GCCTCCATCTCCTGCAGA | AAATCTGGAACTGCCTCT |
| | TTCTGGTGGCCACCGCCACCGGCGT | SQSILHSNGNTYLEWYQQRPGQ | GGCCACCG | TCCTCCCAGTCCATCCTG | GTTGTGTGCCTGCTGAAT |
| | GCACAGCGACGTCGTGATGACACAG | SPRRLICKVSNRFSGVPDRFSG | CCACCGGC | CACTCCAACGGCAACACC | AACTTCTATCCCAGAGAG |
| | TCCCCCCTGTCCCTGCCTGTGACCC | SGSGTDFTLKISRVEAEDVGVY | GTGCACAG | TACCTGGAATGGTATCAG | GCCAAAGTACAGTGGAAG |
| | TGGGACAGCCTGCCTCCATCTCCTG | YCFQGSHVPFTFGQGTKLEIKR | C | CAGCGGCCTGGCCAGTCC | GTGGATAACGCCCTCCAA |
| | CAGATCCTCCCAGTCCATCCTGCAC | TVAAPSVFIFPPSDEQLKSGTA | (nucleo- | CCCAGACGGCTGATCTGC | TCGGGTAACTCCCAGGAG |
| | TCCAACGGCAACACCTACCTGGAAT | SVVCLLNNFYPREAKVQWKVDN | tides 1 | AAGGTGTCCAACCGGTTC | AGTGTCACAGAGCAGGAC |
| | GGTATCAGCAGCGGCCTGGCCAGTC | ALQSGNSQESVTEQDSKDSTYS | to 57 of | TCTGGCGTGCCCGACAGA | AGCAAGGACAGCACCTAC |
| | CCCCAGACGGCTGATCTGCAAGGTG | LSSTLTLSKADYEKHKVYACEV | SEQ ID | TTCTCCGGCTCTGGCTCT | AGCCTCAGCAGCACCCTG |
| | TCCAACCGGTTCTCTGGCGTGCCCG | THQGLSSPVTKSFNRGEC | NO: 441) | GGCACCGACTTCACCCTG | ACGCTGAGCAAAGCAGAC |
| | ACAGATTCTCCGGCTCTGGCTCTGG | Without leader [SEQ ID | [SEQ ID | AAGATCTCCCGGGTGGAA | TACGAGAAACACAAAGTC |
| | CACCGACTTCACCCTGAAGATCTCC | NO: 444]: | NO: 445] | GCCGAGGACGTGGGCGTG | TACGCCTGCGAAGTCACC |
| | CGGGTGGAAGCCGAGGACGTGGGCG | DVVMTQSPLSLPVTLGQPASIS | | TACTACTGTTTTCAAGGC | CATCAGGGCCTGAGCTCG |
| | TGTACTACTGTTTTCAAGGCTCCCA | CRSSQSILHSNGNTYLEWYQQR | | TCCCACGTGCCCTTCACC | CCCGTCACAAAGAGCTTC |
| | CGTGCCCTTCACCTTCGGCCAGGGC | PGQSPRRLICKVSNRFSGVPDR | | TTCGGCCAGGGCACCAAG | AACAGGGGAGAGTGT |
| | ACCAAGCTGGAAATCAAACGAACTG | FSGSGSGTDFTLKISRVEAEDV | | CTGGAAATCAAA | (nucleotides 394 |
| | TGGCTGCACCATCTGTCTTCATCTT | GVYYCFQGSHVPFTFGQGTKLE | | (nucleotides 58 to | to 714 of SEQ ID |
| | CCCGCCATCTGATGAGCAGTTGAAA | IKRTVAAPSVFIFPPSDEQLKS | | 393 of SEQ ID NO: | NO: 441) |
| | TCTGGAACTGCCTCTGTTGTGTGCC | GTASVVCLLNNFYPREAKVQWK | | 441) | [SEQ ID NO: 448] |
| | TGCTGAATAACTTCTATCCCAGAGA | VDNALQSGNSQESVTEQDSKDS | | [SEQ ID NO: 446] | RTVAAPSVFIFPPSDEQL |
| | GGCCAAAGTACAGTGGAAGGTGGAT | TYSLSSTLTLSKADYEKHKVYA | | DVVMTQSPLSLPVTLGQP | KSGTASVVCLLNNFYPRE |
| | AACGCCCTCCAATCGGGTAACTCCC | CEVTHQGLSSPVTKSFNRGEC | | ASISCRSSQSILHSNGNT | AKVQWKVDNALQSGNSQE |
| | AGGAGAGTGTCACAGAGCAGGACAG | | | YLEWYQQRPGQSPRRLIC | SVTEQDSKDSTYSLSSTL |
| | CAAGGACAGCACCTACAGCCTCAGC | | | KVSNRFSGVPDRFSGSGS | TLSKADYEKHKVYACEVT |
| | AGCACCCTGACGCTGAGCAAAGCAG | | | GTDFTLKISRVEAEDVGV | HQGLSSPVTKSFNRGEC |
| | ACTACGAGAAACACAAAGTCTACGC | | | YYCFQGSHVPFTFGQGTK | [SEQ ID NO: 449] |
| | CTGCGAAGTCACCCATCAGGGCCTG | | | LEIK | |
| | AGCTCGCCCGTCACAAAGAGCTTCA | | | [SEQ ID NO: 447] | |
| | ACAGGGGAGAGTGTTGA | | | | |
| | Without leader [SEQ ID | | | | |
| | NO: 442]: | | | | |
| | GACGTCGTGATGACACAGTCCCCCC | | | | |
| | TGTCCCTGCCTGTGACCCTGGGACA | | | | |
| | GCCTGCCTCCATCTCCTGCAGATCC | | | | |
| | TCCCAGTCCATCCTGCACTCCAACG | | | | |
| | GCAACACCTACCTGGAATGGTATCA | | | | |
| | GCAGCGGCCTGGCCAGTCCCCCAGA | | | | |
| | CGGCTGATCTGCAAGGTGTCCAACC | | | | |
| | GGTTCTCTGGCGTGCCCGACAGATT | | | | |
| | CTCCGGCTCTGGCTCTGGCACCGAC | | | | |
| | TTCACCCTGAAGATCTCCCGGGTGG | | | | |
| | AAGCCGAGGACGTGGGCGTGTACTA | | | | |
| | CTGTTTTCAAGGCTCCCACGTGCCC | | | | |
| | TTCACCTTCGGCCAGGGCACCAAGC | | | | |
| | TGGAAATCAAACGAACTGTGGCTGC | | | | |
| | ACCATCTGTCTTCATCTTCCCGCCA | | | | |
| | TCTGATGAGCAGTTGAAATCTGGAA | | | | |
| | CTGCCTCTGTTGTGTGCCTGCTGAA | | | | |
| | TAACTTCTATCCCAGAGAGGCCAAA | | | | |
| | GTACAGTGGAAGGTGGATAACGCCC | | | | |
| | TCCAATCGGGTAACTCCCAGGAGAG | | | | |
| | TGTCACAGAGCAGGACAGCAAGGAC | | | | |
| | AGCACCTACAGCCTCAGCAGCACCC | | | | |
| | TGACGCTGAGCAAAGCAGACTACGA | | | | |
| | GAAACACAAAGTCTACGCCTGCGAA | | | | |
| | GTCACCCATCAGGGCCTGAGCTCGC | | | | |
| | CCGTCACAAAGAGCTTCAACAGGGG | | | | |
| | AGAGTGTTGA | | | | |
| 7G6- | With leader [SEQ ID NO: | With leader [SEQ ID | ATGGGCTG | GACGTCGTGATGACACAG | CGAACTGTGGCTGCACCA |
| LCzu5 | 450]: | NO: 452]: | GTCCTGCA | TCCCCCCTGTCCCTGCCT | TCTGTCTTCATCTTCCCG |
| | ATGGGCTGGTCCTGCATCATCCTGT | MGWSCIILFLVATATGVHSDVV | TCATCCTG | GTGACCCTGGGACAGCCT | CCATCTGATGAGCAGTTG |
| | TTCTGGTGGCCACCGCCACCGGCGT | MTQSPLSLPVTLGQPASISCRS | TTTCTGGT | GCCTCCATCTCCTGCAGA | AAATCTGGAACTGCCTCT |
| | GCACAGCGACGTCGTGATGACACAG | SQSILHSNGNTYLEWFQQRPGQ | GGCCACCG | TCCTCCCAGTCCATCCTG | GTTGTGTGCCTGCTGAAT |
| | TCCCCCCTGTCCCTGCCTGTGACCC | SPRLLICKVSNRFSGVPDRFSG | CCACCGGC | CACTCCAACGGCAACACC | AACTTCTATCCCAGAGAG |
| | TGGGACAGCCTGCCTCCATCTCCTG | SGSGTDFTLKISRVEAEDVGVY | GTGCACAG | TACCTGGAATGGTTCCAG | GCCAAAGTACAGTGGAAG |
| | CAGATCCTCCCAGTCCATCCTGCAC | YCFQGSHVPFTFGQGTKLEIKR | C | CAGCGGCCTGGCCAGTCC | GTGGATAACGCCCTCCAA |
| | TCCAACGGCAACACCTACCTGGAAT | TVAAPSVFIFPPSDEQLKSGTA | (nucleo- | CCCAGACTGCTGATCTGC | TCGGGTAACTCCCAGGAG |
| | GGTTCCAGCAGCGGCCTGGCCAGTC | SVVCLLNNFYPREAKVQWKVDN | tides 1 | AAGGTGTCCAACCGGTTC | AGTGTCACAGAGCAGGAC |
| | CCCCAGACTGCTGATCTGCAAGGTG | ALQSGNSQESVTEQDSKDSTYS | to 57 of | TCCGGCGTGCCCGACAGA | AGCAAGGACAGCACCTAC |
| | TCCAACCGGTTCTCCGGCGTGCCCG | LSSTLTLSKADYEKHKVYACEV | SEQ ID | TTCTCCGGCTCTGGCTCT | AGCCTCAGCAGCACCCTG |
| | ACAGATTCTCCGGCTCTGGCTCTGG | THQGLSSPVTKSFNRGEC | NO: 450) | GGCACCGACTTCACCCTG | ACGCTGAGCAAAGCAGAC |
| | CACCGACTTCACCCTGAAGATCTCC | Without leader [SEQ ID | [SEQ ID | AAGATCTCCCGGGTGGAA | TACGAGAAACACAAAGTC |
| | CGGGTGGAAGCCGAGGACGTGGGCG | NO: 453]: | NO: 454] | GCCGAGGACGTGGGCGTG | TACGCCTGCGAAGTCACC |
| | TGTACTACTGTTTTCAAGGCTCCCA | DVVMTQSPLSLPVTLGQPASIS | | TACTACTGTTTTCAAGGC | CATCAGGGCCTGAGCTCG |
| | CGTGCCCTTCACCTTCGGCCAGGGC | CRSSQSILHSNGNTYLEWFQQR | | TCCCACGTGCCCTTCACC | CCCGTCACAAAGAGCTTC |
| | ACCAAGCTGGAAATCAAACGAACTG | PGQSPRLLICKVSNRFSGVPDR | | TTCGGCCAGGGCACCAAG | AACAGGGGAGAGTGT |
| | TGGCTGCACCATCTGTCTTCATCTT | FSGSGSGTDFTLKISRVEAEDV | | CTGGAAATCAAA | (nucleotides 394 |
| | CCCGCCATCTGATGAGCAGTTGAAA | GVYYCFQGSHVPFTFGQGTKLE | | (nucleotides 58 to | to 714 of SEQ ID |
| | TCTGGAACTGCCTCTGTTGTGTGCC | IKRTVAAPSVFIFPPSDEQLKS | | 393 of SEQ ID NO: | NO: 450) |
| | TGCTGAATAACTTCTATCCCAGAGA | GTASVVCLLNNFYPREAKVQWK | | 450) | [SEQ ID NO: 457] |
| | GGCCAAAGTACAGTGGAAGGTGGAT | VDNALQSGNSQESVTEQDSKDS | | [SEQ ID NO: 455] | RTVAAPSVFIFPPSDEQL |
| | AACGCCCTCCAATCGGGTAACTCCC | TYSLSSTLTLSKADYEKHKVYA | | DVVMTQSPLSLPVTLGQP | KSGTASVVCLLNNFYPRE |
| | AGGAGAGTGTCACAGAGCAGGACAG | CEVTHQGLSSPVTKSFNRGEC | | ASISCRSSQSILHSNGNT | AKVQWKVDNALQSGNSQE |
| | CAAGGACAGCACCTACAGCCTCAGC | | | YLEWFQQRPGQSPRLLIC | SVTEQDSKDSTYSLSSTL |
| | AGCACCCTGACGCTGAGCAAAGCAG | | | KVSNRFSGVPDRFSGSGS | TLSKADYEKHKVYACEVT |
| | ACTACGAGAAACACAAAGTCTACGC | | | GTDFTLKISRVEAEDVGV | HQGLSSPVTKSFNRGEC |
| | CTGCGAAGTCACCCATCAGGGCCTG | | | YYCFQGSHVPFTFGQGTK | [SEQ ID NO: 458] |
| | AGCTCGCCCGTCACAAAGAGCTTCA | | | LEIK | |
| | ACAGGGGAGAGTGTTGA | | | [SEQ ID NO: 456] | |
| | Without leader [SEQ ID | | | | |
| | NO: 451]: | | | | |
| | GACGTCGTGATGACACAGTCCCCCC | | | | |
| | TGTCCCTGCCTGTGACCCTGGGACA | | | | |
| | GCCTGCCTCCATCTCCTGCAGATCC | | | | |
| | TCCCAGTCCATCCTGCACTCCAACG | | | | |
| | GCAACACCTACCTGGAATGGTTCCA | | | | |
| | GCAGCGGCCTGGCCAGTCCCCCAGA | | | | |
| | CTGCTGATCTGCAAGGTGTCCAACC | | | | |
| | GGTTCTCCGGCGTGCCCGACAGATT | | | | |
| | CTCCGGCTCTGGCTCTGGCACCGAC | | | | |
| | TTCACCCTGAAGATCTCCCGGGTGG | | | | |
| | AAGCCGAGGACGTGGGCGTGTACTA | | | | |
| | CTGTTTTCAAGGCTCCCACGTGCCC | | | | |
| | TTCACCTTCGGCCAGGGCACCAAGC | | | | |
| | TGGAAATCAAACGAACTGTGGCTGC | | | | |
| | ACCATCTGTCTTCATCTTCCCGCCA | | | | |
| | TCTGATGAGCAGTTGAAATCTGGAA | | | | |
| | CTGCCTCTGTTGTGTGCCTGCTGAA | | | | |
| | TAACTTCTATCCCAGAGAGGCCAAA | | | | |
| | GTACAGTGGAAGGTGGATAACGCCC | | | | |
| | TCCAATCGGGTAACTCCCAGGAGAG | | | | |
| | TGTCACAGAGCAGGACAGCAAGGAC | | | | |
| | AGCACCTACAGCCTCAGCAGCACCC | | | | |
| | TGACGCTGAGCAAAGCAGACTACGA | | | | |
| | GAAACACAAAGTCTACGCCTGCGAA | | | | |
| | GTCACCCATCAGGGCCTGAGCTCGC | | | | |
| | CCGTCACAAAGAGCTTCAACAGGGG | | | | |
| | AGAGTGTTGA | | | | |
| 7G6- | With leader [SEQ ID NO: | With leader [SEQ ID | ATGGGCTG | GACGTCGTGATGACACAG | CGAACTGTGGCTGCACCA |
| LCzu6 | 459]: | NO: 461]: | GTCCTGCA | TCCCCCCTGTCCCTGCCT | TCTGTCTTCATCTTCCCG |
| | ATGGGCTGGTCCTGCATCATCCTGT | MGWSCIILFLVATATGVHSDVV | TCATCCTG | GTGACCCTGGGACAGCCT | CCATCTGATGAGCAGTTG |
| | TTCTGGTGGCCACCGCCACCGGCGT | MTQSPLSLPVTLGQPASISCRS | TTTCTGGT | GCCTCCATCTCCTGCAGA | AAATCTGGAACTGCCTCT |
| | GCACAGCGACGTCGTGATGACACAG | SQSILHSNGNTYLEWYQQRPGQ | GGCCACCG | TCCTCCCAGTCCATCCTG | GTTGTGTGCCTGCTGAAT |
| | TCCCCCCTGTCCCTGCCTGTGACCC | SPRLLISKVSNRFSGVPDRFSG | CCACCGGC | CACTCCAACGGCAACACC | AACTTCTATCCCAGAGAG |
| | TGGGACAGCCTGCCTCCATCTCCTG | SGSGTDFTLKISRVEAEDVGVY | GTGCACAG | TACCTGGAATGGTATCAG | GCCAAAGTACAGTGGAAG |
| | CAGATCCTCCCAGTCCATCCTGCAC | YCFQGSHVPFTFGQGTKLEIKR | C | CAGCGGCCTGGCCAGTCT | GTGGATAACGCCCTCCAA |
| | TCCAACGGCAACACCTACCTGGAAT | TVAAPSVFIFPPSDEQLKSGTA | (nucleo- | CCCCGGCTGCTGATTTCC | TCGGGTAACTCCCAGGAG |
| | GGTATCAGCAGCGGCCTGGCCAGTC | SVVCLLNNFYPREAKVQWKVDN | tides 1 | AAGGTGTCCAACCGGTTC | AGTGTCACAGAGCAGGAC |
| | TCCCCGGCTGCTGATTTCCAAGGTG | ALQSGNSQESVTEQDSKDSTYS | to 57 OF | TCCGGCGTGCCCGACAGA | AGCAAGGACAGCACCTAC |
| | TCCAACCGGTTCTCCGGCGTGCCCG | LSSTLTLSKADYEKHKVYACEV | SEQ ID | TTCTCCGGCTCTGGCTCT | AGCCTCAGCAGCACCCTG |
| | ACAGATTCTCCGGCTCTGGCTCTGG | THQGLSSPVTKSFNRGEC | NO: 459) | GGCACCGACTTCACCCTG | ACGCTGAGCAAAGCAGAC |
| | CACCGACTTCACCCTGAAGATCTCC | Without leader [SEQ ID | [SEQ ID | AAGATCTCCCGGGTGGAA | TACGAGAAACACAAAGTC |
| | CGGGTGGAAGCCGAGGACGTGGGCG | NO: 462]: | NO: 463] | GCCGAGGACGTGGGCGTG | TACGCCTGCGAAGTCACC |
| | TGTACTACTGTTTTCAAGGCTCCCA | DVVMTQSPLSLPVTLGQPASIS | | TACTACTGTTTTCAAGGC | CATCAGGGCCTGAGCTCG |
| | CGTGCCCTTCACCTTCGGCCAGGGC | CRSSQSILHSNGNTYLEWYQQR | | TCCCACGTGCCCTTCACC | CCCGTCACAAAGAGCTTC |
| | ACCAAGCTGGAAATCAAACGAACTG | PGQSPRLLISKVSNRFSGVPDR | | TTCGGCCAGGGCACCAAG | AACAGGGGAGAGTGT |
| | TGGCTGCACCATCTGTCTTCATCTT | FSGSGSGTDFTLKISRVEAEDV | | CTGGAAATCAAA | (nucleotides 394 |
| | CCCGCCATCTGATGAGCAGTTGAAA | GVYYCFQGSHVPFTFGQGTKLE | | (nucleotides 58 to | to 714 of SEQ ID |
| | TCTGGAACTGCCTCTGTTGTGTGCC | IKRTVAAPSVFIFPPSDEQLKS | | 393 of SEQ ID NO: | NO: 459) |
| | TGCTGAATAACTTCTATCCCAGAGA | GTASVVCLLNNFYPREAKVQWK | | 459) | [SEQ ID NO: 466] |
| | GGCCAAAGTACAGTGGAAGGTGGAT | VDNALQSGNSQESVTEQDSKDS | | [SEQ ID NO: 464] | RTVAAPSVFIFPPSDEQL |
| | AACGCCCTCCAATCGGGTAACTCCC | TYSLSSTLTLSKADYEKHKVYA | | DVVMTQSPLSLPVTLGQP | KSGTASVVCLLNNFYPRE |
| | AGGAGAGTGTCACAGAGCAGGACAG | CEVTHQGLSSPVTKSFNRGEC | | ASISCRSSQSILHSNGNT | AKVQWKVDNALQSGNSQE |
| | CAAGGACAGCACCTACAGCCTCAGC | | | YLEWYQQRPGQSPRLLIS | SVTEQDSKDSTYSLSSTL |
| | AGCACCCTGACGCTGAGCAAAGCAG | | | KVSNRFSGVPDRFSGSGS | TLSKADYEKHKVYACEVT |
| | ACTACGAGAAACACAAAGTCTACGC | | | GTDFTLKISRVEAEDVGV | HQGLSSPVTKSFNRGEC |
| | CTGCGAAGTCACCCATCAGGGCCTG | | | YYCFQGSHVPFTFGQGTK | [SEQ ID NO: 467] |
| | AGCTCGCCCGTCACAAAGAGCTTCA | | | LEIK | |
| | ACAGGGGAGAGTGTTGA | | | [SEQ ID NO: 465] | |
| | Without leader [SEQ ID | | | | |
| | NO: 460]: | | | | |
| | GACGTCGTGATGACACAGTCCCCCC | | | | |
| | TGTCCCTGCCTGTGACCCTGGGACA | | | | |
| | GCCTGCCTCCATCTCCTGCAGATCC | | | | |
| | TCCCAGTCCATCCTGCACTCCAACG | | | | |
| | GCAACACCTACCTGGAATGGTATCA | | | | |
| | GCAGCGGCCTGGCCAGTCTCCCCGG | | | | |
| | CTGCTGATTTCCAAGGTGTCCAACC | | | | |
| | GGTTCTCCGGCGTGCCCGACAGATT | | | | |
| | CTCCGGCTCTGGCTCTGGCACCGAC | | | | |
| | TTCACCCTGAAGATCTCCCGGGTGG | | | | |
| | AAGCCGAGGACGTGGGCGTGTACTA | | | | |
| | CTGTTTTCAAGGCTCCCACGTGCCC | | | | |
| | TTCACCTTCGGCCAGGGCACCAAGC | | | | |
| | TGGAAATCAAACGAACTGTGGCTGC | | | | |
| | ACCATCTGTCTTCATCTTCCCGCCA | | | | |
| | TCTGATGAGCAGTTGAAATCTGGAA | | | | |
| | CTGCCTCTGTTGTGTGCCTGCTGAA | | | | |
| | TAACTTCTATCCCAGAGAGGCCAAA | | | | |
| | GTACAGTGGAAGGTGGATAACGCCC | | | | |
| | TCCAATCGGGTAACTCCCAGGAGAG | | | | |
| | TGTCACAGAGCAGGACAGCAAGGAC | | | | |
| | AGCACCTACAGCCTCAGCAGCACCC | | | | |
| | TGACGCTGAGCAAAGCAGACTACGA | | | | |
| | GAAACACAAAGTCTACGCCTGCGAA | | | | |
| | GTCACCCATCAGGGCCTGAGCTCGC | | | | |
| | CCGTCACAAAGAGCTTCAACAGGGG | | | | |
| | AGAGTGTTGA | | | | |
| 7G6- | With leader [SEQ ID NO: | With leader [SEQ ID | ATGGGCTG | GACGTCGTGATGACACAG | CGAACTGTGGCTGCACCA |
| LCzu7 | 468]: | NO: 470]: | GTCCTGCA | TCCCCCCTGTCCCTGCCT | TCTGTCTTCATCTTCCCG |
| | ATGGGCTGGTCCTGCATCATCCTGT | MGWSCIILFLVATATGVHSDVV | TCATCCTG | GTGACCCTGGGACAGCCT | CCATCTGATGAGCAGTTG |
| | TTCTGGTGGCCACCGCCACCGGCGT | MTQSPLSLPVTLGQPASISCRS | TTTCTGGT | GCCTCCATCTCCTGCAGA | AAATCTGGAACTGCCTCT |
| | GCACAGCGACGTCGTGATGACACAG | SQSILHSNGNTYLEWFQQRPGQ | GGCCACCG | TCCTCCCAGTCCATCCTG | GTTGTGTGCCTGCTGAAT |
| | TCCCCCCTGTCCCTGCCTGTGACCC | SPRRLISKVSNRFSGVPDRFSG | CCACCGGC | CACTCCAACGGCAACACC | AACTTCTATCCCAGAGAG |
| | TGGGACAGCCTGCCTCCATCTCCTG | SGSGTDFTLKISRVEAEDVGVY | GTGCACAG | TACCTGGAATGGTTCCAG | GCCAAAGTACAGTGGAAG |
| | CAGATCCTCCCAGTCCATCCTGCAC | YCFQGSHVPFTFGQGTKLEIKR | C | CAGCGGCCTGGCCAGTCT | GTGGATAACGCCCTCCAA |
| | TCCAACGGCAACACCTACCTGGAAT | TVAAPSVFIFPPSDEQLKSGTA | (nucleo- | CCCAGACGGCTGATCTCC | TCGGGTAACTCCCAGGAG |
| | GGTTCCAGCAGCGGCCTGGCCAGTC | SVVCLLNNFYPREAKVQWKVDN | tides 1 | AAGGTGTCCAACCGGTTC | AGTGTCACAGAGCAGGAC |
| | TCCCAGACGGCTGATCTCCAAGGTG | ALQSGNSQESVTEQDSKDSTYS | to 57 of | TCCGGCGTGCCCGACAGA | AGCAAGGACAGCACCTAC |
| | TCCAACCGGTTCTCCGGCGTGCCCG | LSSTLTLSKADYEKHKVYACEV | SEQ ID | TTCTCCGGCTCTGGCTCT | AGCCTCAGCAGCACCCTG |
| | ACAGATTCTCCGGCTCTGGCTCTGG | THQGLSSPVTKSFNRGEC | NO: 468) | GGCACCGACTTCACCCTG | ACGCTGAGCAAAGCAGAC |
| | CACCGACTTCACCCTGAAGATCTCC | Without leader [SEQ ID | [SEQ ID | AAGATCTCCCGGGTGGAA | TACGAGAAACACAAAGTC |
| | CGGGTGGAAGCCGAGGACGTGGGCG | NO: 471]: | NO: 472] | GCCGAGGACGTGGGCGTG | TACGCCTGCGAAGTCACC |
| | TGTACTACTGTTTTCAAGGCTCCCA | DVVMTQSPLSLPVTLGQPASIS | | TACTACTGTTTTCAAGGC | CATCAGGGCCTGAGCTCG |
| | CGTGCCCTTCACCTTCGGCCAGGGC | CRSSQSILHSNGNTYLEWFQQR | | TCCCACGTGCCCTTCACC | CCCGTCACAAAGAGCTTC |
| | ACCAAGCTGGAAATCAAACGAACTG | PGQSPRRLISKVSNRFSGVPDR | | TTCGGCCAGGGCACCAAG | AACAGGGGAGAGTGT |
| | TGGCTGCACCATCTGTCTTCATCTT | FSGSGSGTDFTLKISRVEAEDV | | CTGGAAATCAAA | (nucleotides 394 |
| | CCCGCCATCTGATGAGCAGTTGAAA | GVYYCFQGSHVPFTFGQGTKLE | | (nucleotides 58 to | to 714 of SEQ ID |
| | TCTGGAACTGCCTCTGTTGTGTGCC | IKRTVAAPSVFIFPPSDEQLKS | | 393 of SEQ ID NO: | NO: 468) |
| | TGCTGAATAACTTCTATCCCAGAGA | GTASVVCLLNNFYPREAKVQWK | | 468) | [SEQ ID NO: 475] |
| | GGCCAAAGTACAGTGGAAGGTGGAT | VDNALQSGNSQESVTEQDSKDS | | [SEQ ID NO: 473] | RTVAAPSVFIFPPSDEQL |
| | AACGCCCTCCAATCGGGTAACTCCC | TYSLSSTLTLSKADYEKHKVYA | | DVVMTQSPLSLPVTLGQP | KSGTASVVCLLNNFYPRE |
| | AGGAGAGTGTCACAGAGCAGGACAG | CEVTHQGLSSPVTKSFNRGEC | | ASISCRSSQSILHSNGNT | AKVQWKVDNALQSGNSQE |
| | CAAGGACAGCACCTACAGCCTCAGC | | | YLEWFQQRPGQSPRRLIS | SVTEQDSKDSTYSLSSTL |
| | AGCACCCTGACGCTGAGCAAAGCAG | | | KVSNRFSGVPDRFSGSGS | TLSKADYEKHKVYACEVT |
| | ACTACGAGAAACACAAAGTCTACGC | | | GTDFTLKISRVEAEDVGV | HQGLSSPVTKSFNRGEC |
| | CTGCGAAGTCACCCATCAGGGCCTG | | | YYCFQGSHVPFTFGQGTK | [SEQ ID NO: 476] |
| | AGCTCGCCCGTCACAAAGAGCTTCA | | | LEIK | |
| | ACAGGGGAGAGTGTTGA | | | [SEQ ID NO: 474] | |
| | Without leader [SEQ ID | | | | |
| | NO: 469]: | | | | |
| | GACGTCGTGATGACACAGTCCCCCC | | | | |
| | TGTCCCTGCCTGTGACCCTGGGACA | | | | |
| | GCCTGCCTCCATCTCCTGCAGATCC | | | | |
| | TCCCAGTCCATCCTGCACTCCAACG | | | | |
| | GCAACACCTACCTGGAATGGTTCCA | | | | |
| | GCAGCGGCCTGGCCAGTCTCCCAGA | | | | |
| | CGGCTGATCTCCAAGGTGTCCAACC | | | | |
| | GGTTCTCCGGCGTGCCCGACAGATT | | | | |
| | CTCCGGCTCTGGCTCTGGCACCGAC | | | | |
| | TTCACCCTGAAGATCTCCCGGGTGG | | | | |
| | AAGCCGAGGACGTGGGCGTGTACTA | | | | |
| | CTGTTTTCAAGGCTCCCACGTGCCC | | | | |
| | TTCACCTTCGGCCAGGGCACCAAGC | | | | |
| | TGGAAATCAAACGAACTGTGGCTGC | | | | |
| | ACCATCTGTCTTCATCTTCCCGCCA | | | | |
| | TCTGATGAGCAGTTGAAATCTGGAA | | | | |
| | CTGCCTCTGTTGTGTGCCTGCTGAA | | | | |
| | TAACTTCTATCCCAGAGAGGCCAAA | | | | |
| | GTACAGTGGAAGGTGGATAACGCCC | | | | |
| | TCCAATCGGGTAACTCCCAGGAGAG | | | | |
| | TGTCACAGAGCAGGACAGCAAGGAC | | | | |
| | AGCACCTACAGCCTCAGCAGCACCC | | | | |
| | TGACGCTGAGCAAAGCAGACTACGA | | | | |
| | GAAACACAAAGTCTACGCCTGCGAA | | | | |
| | GTCACCCATCAGGGCCTGAGCTCGC | | | | |
| | CCGTCACAAAGAGCTTCAACAGGGG | | | | |
| | AGAGTGTTGA | | | | |
| 7G6- | With leader [SEQ ID NO: | With leader [SEQ ID | ATGGGCTG | GACGTCGTGATGACACAG | CGAACTGTGGCTGCACCA |
| LCzu8 | 477]: | NO: 479]: | GTCCTGCA | TCCCCCCTGTCCCTGCCT | TCTGTCTTCATCTTCCCG |
| | ATGGGCTGGTCCTGCATCATCCTGT | MGWSCIILFLVATATGVHSDVV | TCATCCTG | GTGACCCTGGGACAGCCT | CCATCTGATGAGCAGTTG |
| | TTCTGGTGGCCACCGCCACCGGCGT | MTQSPLSLPVTLGQPASISCRS | TTTCTGGT | GCCTCCATCTCCTGCAGA | AAATCTGGAACTGCCTCT |
| | GCACAGCGACGTCGTGATGACACAG | SQSIVHSNGNTYLEWFQQRPGQ | GGCCACCG | TCCTCCCAGTCCATCGTG | GTTGTGTGCCTGCTGAAT |
| | TCCCCCCTGTCCCTGCCTGTGACCC | SPRRLISKVSNRFSGVPDRFSG | CCACCGGC | CACTCCAACGGCAACACC | AACTTCTATCCCAGAGAG |
| | TGGGACAGCCTGCCTCCATCTCCTG | SGSGTDFTLKISRVEAEDVGVY | GTGCACAG | TACCTGGAATGGTTCCAG | GCCAAAGTACAGTGGAAG |
| | CAGATCCTCCCAGTCCATCGTGCAC | YCFQGSHVPFTFGQGTKLEIKR | C | CAGCGGCCTGGCCAGTCT | GTGGATAACGCCCTCCAA |
| | TCCAACGGCAACACCTACCTGGAAT | TVAAPSVFIFPPSDEQLKSGTA | (nucleo- | CCCAGACGGCTGATCTCC | TCGGGTAACTCCCAGGAG |
| | GGTTCCAGCAGCGGCCTGGCCAGTC | SVVCLLNNFYPREAKVQWKVDN | tides 1 | AAGGTGTCCAACCGGTTC | AGTGTCACAGAGCAGGAC |
| | TCCCAGACGGCTGATCTCCAAGGTG | ALQSGNSQESVTEQDSKDSTYS | to 57 of | TCCGGCGTGCCCGACAGA | AGCAAGGACAGCACCTAC |
| | TCCAACCGGTTCTCCGGCGTGCCCG | LSSTLTLSKADYEKHKVYACEV | SEQ ID | TTCTCCGGCTCTGGCTCT | AGCCTCAGCAGCACCCTG |
| | ACAGATTCTCCGGCTCTGGCTCTGG | THQGLSSPVTKSFNRGEC | NO: 477) | GGCACCGACTTCACCCTG | ACGCTGAGCAAAGCAGAC |
| | CACCGACTTCACCCTGAAGATCTCC | Without leader [SEQ ID | [SEQ ID | AAGATCTCCCGGGTGGAA | TACGAGAAACACAAAGTC |
| | CGGGTGGAAGCCGAGGACGTGGGCG | NO: 480]: | NO: 481] | GCCGAGGACGTGGGCGTG | TACGCCTGCGAAGTCACC |
| | TGTACTACTGTTTTCAAGGCTCCCA | DVVMTQSPLSLPVTLGQPASIS | | TACTACTGTTTTCAAGGC | CATCAGGGCCTGAGCTCG |
| | CGTGCCCTTCACCTTCGGCCAGGGC | CRSSQSIVHSNGNTYLEWFQQR | | TCCCACGTGCCCTTCACC | CCCGTCACAAAGAGCTTC |
| | ACCAAGCTGGAAATCAAACGAACTG | PGQSPRRLISKVSNRFSGVPDR | | TTCGGCCAGGGCACCAAG | AACAGGGGAGAGTGT |
| | TGGCTGCACCATCTGTCTTCATCTT | FSGSGSGTDFTLKISRVEAEDV | | CTGGAAATCAAA | (nucleotides 394 |
| | CCCGCCATCTGATGAGCAGTTGAAA | GVYYCFQGSHVPFTFGQGTKLE | | (nucleotides 58 to | to 714 of SEQ ID |
| | TCTGGAACTGCCTCTGTTGTGTGCC | IKRTVAAPSVFIFPPSDEQLKS | | 393 of SEQ ID NO: | NO: 477) |
| | TGCTGAATAACTTCTATCCCAGAGA | GTASVVCLLNNFYPREAKVQWK | | 477) | RTVAAPSVFIFPPSDEQL |
| | GGCCAAAGTACAGTGGAAGGTGGAT | VDNALQSGNSQESVTEQDSKDS | | [SEQ ID NO: 482] | KSGTASVVCLLNNFYPRE |
| | AACGCCCTCCAATCGGGTAACTCCC | TYSLSSTLTLSKADYEKHKVYA | | DVVMTQSPLSLPVTLGQP | AKVQWKVDNALQSGNSQE |
| | AGGAGAGTGTCACAGAGCAGGACAG | CEVTHQGLSSPVTKSFNRGEC | | ASISCRSSQSIVHSNGNT | SVTEQDSKDSTYSLSSTL |
| | CAAGGACAGCACCTACAGCCTCAGC | | | YLEWFQQRPGQSPRRLIS | TLSKADYEKHKVYACEVT |
| | AGCACCCTGACGCTGAGCAAAGCAG | | | KVSNRFSGVPDRFSGSGS | HQGLSSPVTKSFNRGEC |
| | ACTACGAGAAACACAAAGTCTACGC | | | GTDFTLKISRVEAEDVGV | [SEQ ID NO: 484] |
| | CTGCGAAGTCACCCATCAGGGCCTG | | | YYCFQGSHVPFTFGQGTK | |
| | AGCTCGCCCGTCACAAAGAGCTTCA | | | LEIK | |
| | ACAGGGGAGAGTGTTGA | | | [SEQ ID NO: 483] | |
| | Without leader [SEQ ID | | | | |
| | NO: 478]: | | | | |
| | GACGTCGTGATGACACAGTCCCCCC | | | | |
| | TGTCCCTGCCTGTGACCCTGGGACA | | | | |
| | GCCTGCCTCCATCTCCTGCAGATCC | | | | |
| | TCCCAGTCCATCGTGCACTCCAACG | | | | |
| | GCAACACCTACCTGGAATGGTTCCA | | | | |
| | GCAGCGGCCTGGCCAGTCTCCCAGA | | | | |
| | CGGCTGATCTCCAAGGTGTCCAACC | | | | |
| | GGTTCTCCGGCGTGCCCGACAGATT | | | | |
| | CTCCGGCTCTGGCTCTGGCACCGAC | | | | |
| | TTCACCCTGAAGATCTCCCGGGTGG | | | | |
| | AAGCCGAGGACGTGGGCGTGTACTA | | | | |
| | CTGTTTTCAAGGCTCCCACGTGCCC | | | | |
| | TTCACCTTCGGCCAGGGCACCAAGC | | | | |
| | TGGAAATCAAACGAACTGTGGCTGC | | | | |
| | ACCATCTGTCTTCATCTTCCCGCCA | | | | |
| | TCTGATGAGCAGTTGAAATCTGGAA | | | | |
| | CTGCCTCTGTTGTGTGCCTGCTGAA | | | | |
| | TAACTTCTATCCCAGAGAGGCCAAA | | | | |
| | GTACAGTGGAAGGTGGATAACGCCC | | | | |
| | TCCAATCGGGTAACTCCCAGGAGAG | | | | |
| | TGTCACAGAGCAGGACAGCAAGGAC | | | | |
| | AGCACCTACAGCCTCAGCAGCACCC | | | | |
| | TGACGCTGAGCAAAGCAGACTACGA | | | | |
| | GAAACACAAAGTCTACGCCTGCGAA | | | | |
| | GTCACCCATCAGGGCCTGAGCTCGC | | | | |
| | CCGTCACAAAGAGCTTCAACAGGGG | | | | |
| | AGAGTGTTGA | | | | |
| 7G6- | With leader [SEQ ID NO: | With leader [SEQ ID | ATGGGCTG | GACGTCGTGATGACACAG | CGAACTGTGGCTGCACCA |
| LCzu9 | 485]: | NO: 487]: | GTCCTGCA | TCCCCCCTGTCCCTGCCT | TCTGTCTTCATCTTCCCG |
| | ATGGGCTGGTCCTGCATCATCCTGT | MGWSCIILFLVATATGVHSDVV | TCATCCTG | GTGACCCTGGGACAGCCT | CCATCTGATGAGCAGTTG |
| | TTCTGGTGGCCACCGCCACCGGCGT | MTQSPLSLPVTLGQPASISCRS | TTTCTGGT | GCCTCCATCTCCTGCAGA | AAATCTGGAACTGCCTCT |
| | GCACAGCGACGTCGTGATGACACAG | SQSIVHSNGNTYLNWFQQRPGQ | GGCCACCG | TCCTCCCAGTCCATCGTG | GTTGTGTGCCTGCTGAAT |
| | TCCCCCCTGTCCCTGCCTGTGACCC | SPRRLISKVSNRFSGVPDRFSG | CCACCGGC | CACTCCAACGGCAACACC | AACTTCTATCCCAGAGAG |
| | TGGGACAGCCTGCCTCCATCTCCTG | SGSGTDFTLKISRVEAEDVGVY | GTGCACAG | TACCTGAACTGGTTCCAG | GCCAAAGTACAGTGGAAG |
| | CAGATCCTCCCAGTCCATCGTGCAC | YCFQGSHVPFTFGQGTKLEIKR | C | CAGCGGCCTGGCCAGTCT | GTGGATAACGCCCTCCAA |
| | TCCAACGGCAACACCTACCTGAACT | TVAAPSVFIFPPSDEQLKSGTA | (nucleo- | CCCAGACGGCTGATCTCC | TCGGGTAACTCCCAGGAG |
| | GGTTCCAGCAGCGGCCTGGCCAGTC | SVVCLLNNFYPREAKVQWKVDN | tides 1 | AAGGTGTCCAACCGGTTC | AGTGTCACAGAGCAGGAC |
| | TCCCAGACGGCTGATCTCCAAGGTG | ALQSGNSQESVTEQDSKDSTYS | to 57 of | TCCGGCGTGCCCGACAGA | AGCAAGGACAGCACCTAC |
| | TCCAACCGGTTCTCCGGCGTGCCCG | LSSTLTLSKADYEKHKVYACEV | SEQ ID | TTCTCCGGCTCTGGCTCT | AGCCTCAGCAGCACCCTG |
| | ACAGATTCTCCGGCTCTGGCTCTGG | THQGLSSPVTKSFNRGEC | NO: 485) | GGCACCGACTTCACCCTG | ACGCTGAGCAAAGCAGAC |
| | CACCGACTTCACCCTGAAGATCTCC | Without leader [SEQ ID | [SEQ ID | AAGATCTCCCGGGTGGAA | TACGAGAAACACAAAGTC |
| | CGGGTGGAAGCCGAGGACGTGGGCG | NO: 488]: | NO: 489] | GCCGAGGACGTGGGCGTG | TACGCCTGCGAAGTCACC |
| | TGTACTACTGTTTTCAAGGCTCCCA | DVVMTQSPLSLPVTLGQPASIS | | TACTACTGTTTTCAAGGC | CATCAGGGCCTGAGCTCG |
| | CGTGCCCTTCACCTTCGGCCAGGGC | CRSSQSIVHSNGNTYLNWFQQR | | TCCCACGTGCCCTTCACC | CCCGTCACAAAGAGCTTC |
| | ACCAAGCTGGAAATCAAACGAACTG | PGQSPRRLISKVSNRFSGVPDR | | TTCGGCCAGGGCACCAAG | AACAGGGGAGAGTGT |
| | TGGCTGCACCATCTGTCTTCATCTT | FSGSGSGTDFTLKISRVEAEDV | | CTGGAAATCAAA | (nucleotides 394 |
| | CCCGCCATCTGATGAGCAGTTGAAA | GVYYCFQGSHVPFTFGQGTKLE | | (nucleotides 58 to | to 714 of SEQ ID |
| | TCTGGAACTGCCTCTGTTGTGTGCC | IKRTVAAPSVFIFPPSDEQLKS | | 393 of SEQ ID NO: | NO: 485) |
| | TGCTGAATAACTTCTATCCCAGAGA | GTASVVCLLNNFYPREAKVQWK | | 485) | [SEQ ID NO: 492] |
| | GGCCAAAGTACAGTGGAAGGTGGAT | VDNALQSGNSQESVTEQDSKDS | | [SEQ ID NO: 490] | RTVAAPSVFIFPPSDEQL |
| | AACGCCCTCCAATCGGGTAACTCCC | TYSLSSTLTLSKADYEKHKVYA | | DVVMTQSPLSLPVTLGQP | KSGTASVVCLLNNFYPRE |
| | AGGAGAGTGTCACAGAGCAGGACAG | CEVTHQGLSSPVTKSFNRGEC | | ASISCRSSQSIVHSNGNT | AKVQWKVDNALQSGNSQE |
| | CAAGGACAGCACCTACAGCCTCAGC | | | YLNWFQQRPGQSPRRLIS | SVTEQDSKDSTYSLSSTL |
| | AGCACCCTGACGCTGAGCAAAGCAG | | | KVSNRFSGVPDRFSGSGS | TLSKADYEKHKVYACEVT |
| | ACTACGAGAAACACAAAGTCTACGC | | | GTDFTLKISRVEAEDVGV | HQGLSSPVTKSFNRGEC |
| | CTGCGAAGTCACCCATCAGGGCCTG | | | YYCFQGSHVPFTFGQGTK | [SEQ ID NO: 493] |
| | AGCTCGCCCGTCACAAAGAGCTTCA | | | LEIK | |
| | ACAGGGGAGAGTGTTGA | | | [SEQ ID NO: 491] | |
| | Without leader [SEQ ID | | | | |
| | NO: 486]: | | | | |
| | GACGTCGTGATGACACAGTCCCCCC | | | | |
| | TGTCCCTGCCTGTGACCCTGGGACA | | | | |
| | GCCTGCCTCCATCTCCTGCAGATCC | | | | |
| | TCCCAGTCCATCGTGCACTCCAACG | | | | |
| | GCAACACCTACCTGAACTGGTTCCA | | | | |
| | GCAGCGGCCTGGCCAGTCTCCCAGA | | | | |
| | CGGCTGATCTCCAAGGTGTCCAACC | | | | |
| | GGTTCTCCGGCGTGCCCGACAGATT | | | | |
| | CTCCGGCTCTGGCTCTGGCACCGAC | | | | |
| | TTCACCCTGAAGATCTCCCGGGTGG | | | | |
| | AAGCCGAGGACGTGGGCGTGTACTA | | | | |
| | CTGTTTTCAAGGCTCCCACGTGCCC | | | | |
| | TTCACCTTCGGCCAGGGCACCAAGC | | | | |
| | TGGAAATCAAACGAACTGTGGCTGC | | | | |
| | ACCATCTGTCTTCATCTTCCCGCCA | | | | |
| | TCTGATGAGCAGTTGAAATCTGGAA | | | | |
| | CTGCCTCTGTTGTGTGCCTGCTGAA | | | | |
| | TAACTTCTATCCCAGAGAGGCCAAA | | | | |
| | GTACAGTGGAAGGTGGATAACGCCC | | | | |
| | TCCAATCGGGTAACTCCCAGGAGAG | | | | |
| | TGTCACAGAGCAGGACAGCAAGGAC | | | | |
| | AGCACCTACAGCCTCAGCAGCACCC | | | | |
| | TGACGCTGAGCAAAGCAGACTACGA | | | | |
| | GAAACACAAAGTCTACGCCTGCGAA | | | | |
| | GTCACCCATCAGGGCCTGAGCTCGC | | | | |
| | CCGTCACAAAGAGCTTCAACAGGGG | | | | |
| | AGAGTGTTGA | | | | |
| 7G6- | With leader [SEQ ID NO: | With leader [SEQ ID | ATGGGCTG | GACGTCGTGATGACACAG | CGAACTGTGGCTGCACCA |
| LCzu10 | 494]: | NO: 496]: | GTCCTGCA | TCCCCCCTGTCCCTGCCT | TCTGTCTTCATCTTCCCG |
| | ATGGGCTGGTCCTGCATCATCCTGT | MGWSCIILFLVATATGVHSDVV | TCATCCTG | GTGACCCTGGGACAGCCT | CCATCTGATGAGCAGTTG |
| | TTCTGGTGGCCACCGCCACCGGCGT | MTQSPLSLPVTLGQPASISCRS | TTTCTGGT | GCCTCCATCTCCTGCAGA | AAATCTGGAACTGCCTCT |
| | GCACAGCGACGTCGTGATGACACAG | SQSIVHSNGNTYLEWFQQRPGQ | GGCCACCG | TCCTCCCAGTCCATCGTG | GTTGTGTGCCTGCTGAAT |
| | TCCCCCCTGTCCCTGCCTGTGACCC | SPRRLIYKVSNRFSGVPDRFSG | CCACCGGC | CACTCCAACGGCAACACC | AACTTCTATCCCAGAGAG |
| | TGGGACAGCCTGCCTCCATCTCCTG | SGSGTDFTLKISRVEAEDVGVY | GTGCACAG | TACCTGGAATGGTTCCAG | GCCAAAGTACAGTGGAAG |
| | CAGATCCTCCCAGTCCATCGTGCAC | YCFQGSHVPFTFGQGTKLEIKR | C | CAGCGGCCTGGCCAGTCT | GTGGATAACGCCCTCCAA |
| | TCCAACGGCAACACCTACCTGGAAT | TVAAPSVFIFPPSDEQLKSGTA | (nucleo- | CCCAGACGGCTGATCTAC | TCGGGTAACTCCCAGGAG |
| | GGTTCCAGCAGCGGCCTGGCCAGTC | SVVCLLNNFYPREAKVQWKVDN | tides 1 | AAGGTGTCCAACCGGTTC | AGTGTCACAGAGCAGGAC |
| | TCCCAGACGGCTGATCTACAAGGTG | ALQSGNSQESVTEQDSKDSTYS | to 57 of | TCCGGCGTGCCCGACAGA | AGCAAGGACAGCACCTAC |
| | TCCAACCGGTTCTCCGGCGTGCCCG | LSSTLTLSKADYEKHKVYACEV | SEQ ID | TTCTCCGGCTCTGGCTCT | AGCCTCAGCAGCACCCTG |
| | ACAGATTCTCCGGCTCTGGCTCTGG | THQGLSSPVTKSFNRGEC | NO: 494) | GGCACCGACTTCACCCTG | ACGCTGAGCAAAGCAGAC |
| | CACCGACTTCACCCTGAAGATCTCC | Without leader [SEQ ID | [SEQ ID | AAGATCTCCCGGGTGGAA | TACGAGAAACACAAAGTC |
| | CGGGTGGAAGCCGAGGACGTGGGCG | NO: 497]: | NO: 498] | GCCGAGGACGTGGGCGTG | TACGCCTGCGAAGTCACC |
| | TGTACTACTGTTTTCAAGGCTCCCA | DVVMTQSPLSLPVTLGQPASIS | | TACTACTGTTTTCAAGGC | CATCAGGGCCTGAGCTCG |
| | CGTGCCCTTCACCTTCGGCCAGGGC | CRSSQSIVHSNGNTYLEWFQQR | | TCCCACGTGCCCTTCACC | CCCGTCACAAAGAGCTTC |
| | ACCAAGCTGGAAATCAAACGAACTG | PGQSPRRLIYKVSNRFSGVPDR | | TTCGGCCAGGGCACCAAG | AACAGGGGAGAGTGT |
| | TGGCTGCACCATCTGTCTTCATCTT | FSGSGSGTDFTLKISRVEAEDV | | CTGGAAATCAAA | (nucleotides 394 |
| | CCCGCCATCTGATGAGCAGTTGAAA | GVYYCFQGSHVPFTFGQGTKLE | | (nucleotides 58 to | to 714 of SEQ ID |
| | TCTGGAACTGCCTCTGTTGTGTGCC | IKRTVAAPSVFIFPPSDEQLKS | | 393 of SEQ ID NO: | NO: 494) |
| | TGCTGAATAACTTCTATCCCAGAGA | GTASVVCLLNNFYPREAKVQWK | | 494) | [SEQ ID NO: 501] |
| | GGCCAAAGTACAGTGGAAGGTGGAT | VDNALQSGNSQESVTEQDSKDS | | [SEQ ID NO: 499] | RTVAAPSVFIFPPSDEQL |
| | AACGCCCTCCAATCGGGTAACTCCC | TYSLSSTLTLSKADYEKHKVYA | | DVVMTQSPLSLPVTLGQP | KSGTASVVCLLNNFYPRE |
| | AGGAGAGTGTCACAGAGCAGGACAG | CEVTHQGLSSPVTKSFNRGEC | | ASISCRSSQSIVHSNGNT | AKVQWKVDNALQSGNSQE |
| | CAAGGACAGCACCTACAGCCTCAGC | | | YLEWFQQRPGQSPRRLIY | SVTEQDSKDSTYSLSSTL |
| | AGCACCCTGACGCTGAGCAAAGCAG | | | KVSNRFSGVPDRFSGSGS | TLSKADYEKHKVYACEVT |
| | ACTACGAGAAACACAAAGTCTACGC | | | GTDFTLKISRVEAEDVGV | HQGLSSPVTKSFNRGEC |
| | CTGCGAAGTCACCCATCAGGGCCTG | | | YYCFQGSHVPFTFGQGTK | [SEQ ID NO: 502] |
| | AGCTCGCCCGTCACAAAGAGCTTCA | | | LEIK | |
| | ACAGGGGAGAGTGTTGA | | | [SEQ ID NO: 500] | |
| | Without leader [SEQ ID | | | | |
| | NO: 495]: | | | | |
| | GACGTCGTGATGACACAGTCCCCCC | | | | |
| | TGTCCCTGCCTGTGACCCTGGGACA | | | | |
| | GCCTGCCTCCATCTCCTGCAGATCC | | | | |
| | TCCCAGTCCATCGTGCACTCCAACG | | | | |
| | GCAACACCTACCTGGAATGGTTCCA | | | | |
| | GCAGCGGCCTGGCCAGTCTCCCAGA | | | | |
| | CGGCTGATCTACAAGGTGTCCAACC | | | | |
| | GGTTCTCCGGCGTGCCCGACAGATT | | | | |
| | CTCCGGCTCTGGCTCTGGCACCGAC | | | | |
| | TTCACCCTGAAGATCTCCCGGGTGG | | | | |
| | AAGCCGAGGACGTGGGCGTGTACTA | | | | |
| | CTGTTTTCAAGGCTCCCACGTGCCC | | | | |
| | TTCACCTTCGGCCAGGGCACCAAGC | | | | |
| | TGGAAATCAAACGAACTGTGGCTGC | | | | |
| | ACCATCTGTCTTCATCTTCCCGCCA | | | | |
| | TCTGATGAGCAGTTGAAATCTGGAA | | | | |
| | CTGCCTCTGTTGTGTGCCTGCTGAA | | | | |
| | TAACTTCTATCCCAGAGAGGCCAAA | | | | |
| | GTACAGTGGAAGGTGGATAACGCCC | | | | |
| | TCCAATCGGGTAACTCCCAGGAGAG | | | | |
| | TGTCACAGAGCAGGACAGCAAGGAC | | | | |
| | AGCACCTACAGCCTCAGCAGCACCC | | | | |
| | TGACGCTGAGCAAAGCAGACTACGA | | | | |
| | GAAACACAAAGTCTACGCCTGCGAA | | | | |
| | GTCACCCATCAGGGCCTGAGCTCGC | | | | |
| | CCGTCACAAAGAGCTTCAACAGGGG | | | | |
| | AGAGTGTTGA | | | | |
| 7G6- | With leader [SEQ ID NO: | With leader [SEQ ID | ATGGGCTG | GATATCCAGATGACCCAG | GATATCCAGATGACCCAG |
| LCzu11 | 503]: | NO: 505]: | GTCCTGCA | TCCCCTTCCAGCCTGTCC | TCCCCTTCCAGCCTGTCC |
| | ATGGGCTGGTCCTGCATCATCCTGT | MGWSCIILFLVATATGVHSDIQ | TCATCCTG | GCCTCTGTGGGCGACAGA | GCCTCTGTGGGCGACAGA |
| | TTCTGGTGGCCACCGCCACCGGCGT | MTQSPSSLSASVGDRVTITCRS | TTTCTGGT | GTGACCATCACCTGTCGG | GTGACCATCACCTGTCGG |
| | GCACAGCGATATCCAGATGACCCAG | SQSILHSNGNTYLEWYQQKPGK | GGCCACCG | TCCTCCCAGTCCATCCTG | TCCTCCCAGTCCATCCTG |
| | TCCCCTTCCAGCCTGTCCGCCTCTG | APKLLIYKVSNRFSGVPSRFSG | CCACCGGC | CACTCCAACGGCAACACC | CACTCCAACGGCAACACC |
| | TGGGCGACAGAGTGACCATCACCTG | SGSGTDFTLTISSLQPEDFATY | GTGCACAG | TACCTGGAATGGTATCAG | TACCTGGAATGGTATCAG |
| | TCGGTCCTCCCAGTCCATCCTGCAC | YCFQGSHVPFTFGQGTKLEIKR | C | CAGAAGCCCGGCAAGGCC | CAGAAGCCCGGCAAGGCC |
| | TCCAACGGCAACACCTACCTGGAAT | TVAAPSVFIFPPSDEQLKSGTA | (nucleo- | CCTAAGCTGCTGATCTAC | CCTAAGCTGCTGATCTAC |
| | GGTATCAGCAGAAGCCCGGCAAGGC | SVVCLLNNFYPREAKVQWKVDN | tides 1 | AAGGTGTCCAACCGGTTC | AAGGTGTCCAACCGGTTC |
| | CCCTAAGCTGCTGATCTACAAGGTG | ALQSGNSQESVTEQDSKDSTYS | to 57 of | TCCGGCGTGCCCTCCAGA | TCCGGCGTGCCCTCCAGA |
| | TCCAACCGGTTCTCCGGCGTGCCCT | LSSTLTLSKADYEKHKVYACEV | SEQ ID | TTCTCCGGCTCTGGCTCT | TTCTCCGGCTCTGGCTCT |
| | CCAGATTCTCCGGCTCTGGCTCTGG | THQGLSSPVTKSFNRGEC | NO: 503) | GGCACCGACTTCACCCTG | GGCACCGACTTCACCCTG |
| | CACCGACTTCACCCTGACCATCTCC | Without leader [SEQ ID | [SEQ ID | ACCATCTCCAGCCTCCAG | ACCATCTCCAGCCTCCAG |
| | AGCCTCCAGCCCGAGGACTTCGCCA | NO: 506]: | NO: 507] | CCCGAGGACTTCGCCACC | CCCGAGGACTTCGCCACC |
| | CCTACTACTGTTTTCAAGGCTCCCA | DIQMTQSPSSLSASVGDRVTIT | | TACTACTGTTTTCAAGGC | TACTACTGTTTTCAAGGC |
| | CGTGCCCTTCACCTTCGGCCAGGGC | CRSSQSILHSNGNTYLEWYQQK | | TCCCACGTGCCCTTCACC | TCCCACGTGCCCTTCACC |
| | ACCAAGCTGGAAATCAAACGAACTG | PGKAPKLLIYKVSNRFSGVPSR | | TTCGGCCAGGGCACCAAG | TTCGGCCAGGGCACCAAG |
| | TGGCTGCACCATCTGTCTTCATCTT | FSGSGSGTDFTLTISSLQPEDF | | CTGGAAATCAAA | CTGGAAATCAAACGAACT |
| | CCCGCCATCTGATGAGCAGTTGAAA | ATYYCFQGSHVPFTFGQGTKLE | | (nucleotides 58 to | GTGGCTGCACCATCTGTC |
| | TCTGGAACTGCCTCTGTTGTGTGCC | IKRTVAAPSVFIFPPSDEQLKS | | 393 of SEQ ID NO: | TTCATCTTCCCGCCATCT |
| | TGCTGAATAACTTCTATCCCAGAGA | GTASVVCLLNNFYPREAKVQWK | | 503) | GATGAGCAGTTGAAATCT |
| | GGCCAAAGTACAGTGGAAGGTGGAT | VDNALQSGNSQESVTEQDSKDS | | [SEQ ID NO: 508] | GGAACTGCCTCTGTTGTG |
| | AACGCCCTCCAATCGGGTAACTCCC | TYSLSSTLTLSKADYEKHKVYA | | DIQMTQSPSSLSASVGDR | TGCCTGCTGAATAACTTC |
| | AGGAGAGTGTCACAGAGCAGGACAG | CEVTHQGLSSPVTKSFNRGEC | | VTITCRSSQSILHSNGNT | TATCCCAGAGAGGCCAAA |
| | CAAGGACAGCACCTACAGCCTCAGC | | | YLEWYQQKPGKAPKLLIY | GTACAGTGGAAGGTGGAT |
| | AGCACCCTGACGCTGAGCAAAGCAG | | | KVSNRFSGVPSRFSGSGS | AACGCCCTCCAATCGGGT |
| | ACTACGAGAAACACAAAGTCTACGC | | | GTDFTLTISSLOPEDFAT | AACTCCCAGGAGAGTGTC |
| | CTGCGAAGTCACCCATCAGGGCCTG | | | YYCFQGSHVPFTFGQGTK | ACAGAGCAGGACAGCAAG |
| | AGCTCGCCCGTCACAAAGAGCTTCA | | | LEIK | GACAGCACCTACAGCCTC |
| | ACAGGGGAGAGTGTTGA | | | [SEQ ID NO: 509] | AGCAGCACCCTGACGCTG |
| | Without leader [SEQ ID | | | | AGCAAAGCAGACTACGAG |
| | NO: 504]: | | | | AAACACAAAGTCTACGCC |
| | GATATCCAGATGACCCAGTCCCCTT | | | | TGCGAAGTCACCCATCAG |
| | CCAGCCTGTCCGCCTCTGTGGGCGA | | | | GGCCTGAGCTCGCCCGTC |
| | CAGAGTGACCATCACCTGTCGGTCC | | | | ACAAAGAGCTTCAACAGG |
| | TCCCAGTCCATCCTGCACTCCAACG | | | | GGAGAGTGT |
| | GCAACACCTACCTGGAATGGTATCA | | | | (nucleotides 394 |
| | GCAGAAGCCCGGCAAGGCCCCTAAG | | | | to 714 of SEQ ID |
| | CTGCTGATCTACAAGGTGTCCAACC | | | | NO: 503) |
| | GGTTCTCCGGCGTGCCCTCCAGATT | | | | [SEQ ID NO: 510] |
| | CTCCGGCTCTGGCTCTGGCACCGAC | | | | RTVAAPSVFIFPPSDEQL |
| | TTCACCCTGACCATCTCCAGCCTCC | | | | KSGTASVVCLLNNFYPRE |
| | AGCCCGAGGACTTCGCCACCTACTA | | | | AKVQWKVDNALQSGNSQE |
| | CTGTTTTCAAGGCTCCCACGTGCCC | | | | SVTEQDSKDSTYSLSSTL |
| | TTCACCTTCGGCCAGGGCACCAAGC | | | | TLSKADYEKHKVYACEVT |
| | TGGAAATCAAACGAACTGTGGCTGC | | | | HQGLSSPVTKSFNRGEC |
| | ACCATCTGTCTTCATCTTCCCGCCA | | | | [SEQ ID NO: 511] |
| | TCTGATGAGCAGTTGAAATCTGGAA | | | | |
| | CTGCCTCTGTTGTGTGCCTGCTGAA | | | | |
| | TAACTTCTATCCCAGAGAGGCCAAA | | | | |
| | GTACAGTGGAAGGTGGATAACGCCC | | | | |
| | TCCAATCGGGTAACTCCCAGGAGAG | | | | |
| | TGTCACAGAGCAGGACAGCAAGGAC | | | | |
| | AGCACCTACAGCCTCAGCAGCACCC | | | | |
| | TGACGCTGAGCAAAGCAGACTACGA | | | | |
| | GAAACACAAAGTCTACGCCTGCGAA | | | | |
| | GTCACCCATCAGGGCCTGAGCTCGC | | | | |
| | CCGTCACAAAGAGCTTCAACAGGGG | | | | |
| | AGAGTGTTGA | | | | |
| 7G6- | With leader [SEQ ID NO: | With leader [SEQ ID | ATGGGCTG | GACGTGCAGATGACCCAG | CGAACTGTGGCTGCACCA |
| LCzu12 | 512]: | NO: 514] | GTCCTGCA | TCCCCTTCCAGCCTGTCT | TCTGTCTTCATCTTCCCG |
| | ATGGGCTGGTCCTGCATCATCCTGT | MGWSCIILFLVATATGVHSDVQ | TCATCCTG | GCCTCCGTGGGCGACAGA | CCATCTGATGAGCAGTTG |
| | TTCTGGTGGCCACCGCCACCGGCGT | MTQSPSSLSASVGDRVTITCRS | TTTCTGGT | GTGACCATCACCTGTCGG | AAATCTGGAACTGCCTCT |
| | GCACAGCGACGTGCAGATGACCCAG | SQSILHSNGNTYLEWYQQKPGK | GGCCACCG | TCCTCCCAGTCCATCCTG | GTTGTGTGCCTGCTGAAT |
| | TCCCCTTCCAGCCTGTCTGCCTCCG | APKLLICKVSNRFSGVPSRFSG | CCACCGGC | CACTCCAACGGCAACACC | AACTTCTATCCCAGAGAG |
| | TGGGCGACAGAGTGACCATCACCTG | SGSGTDFTLTISSLQPEDFATY | GTGCACAG | TACCTGGAATGGTATCAG | GCCAAAGTACAGTGGAAG |
| | TCGGTCCTCCCAGTCCATCCTGCAC | YCFQGSHVPFTFGQGTKLEIKR | C | CAGAAGCCCGGCAAGGCC | GTGGATAACGCCCTCCAA |
| | TCCAACGGCAACACCTACCTGGAAT | TVAAPSVFIFPPSDEQLKSGTA | (nucleo- | CCTAAGCTGCTGATCTGC | TCGGGTAACTCCCAGGAG |
| | GGTATCAGCAGAAGCCCGGCAAGGC | SVVCLLNNFYPREAKVQWKVDN | tides | AAGGTGTCCAACCGGTTC | AGTGTCACAGAGCAGGAC |
| | CCCTAAGCTGCTGATCTGCAAGGTG | ALQSGNSQESVTEQDSKDSTYS | to 57 of | TCCGGCGTGCCCTCCAGA | AGCAAGGACAGCACCTAC |
| | TCCAACCGGTTCTCCGGCGTGCCCT | LSSTLTLSKADYEKHKVYACEV | SEQ ID | TTCTCCGGCTCTGGCTCT | AGCCTCAGCAGCACCCTG |
| | CCAGATTCTCCGGCTCTGGCTCTGG | THQGLSSPVTKSFNRGEC | NO: 512) | GGCACCGACTTCACCCTG | ACGCTGAGCAAAGCAGAC |
| | CACCGACTTCACCCTGACCATCTCC | Without leader [SEQ ID | [SEQ ID | ACCATCTCCAGCCTCCAG | TACGAGAAACACAAAGTC |
| | AGCCTCCAGCCCGAGGACTTCGCCA | NO: 515]: | NO: 516] | CCCGAGGACTTCGCCACC | TACGCCTGCGAAGTCACC |
| | CCTACTACTGTTTTCAAGGCTCCCA | DVQMTQSPSSLSASVGDRVTIT | | TACTACTGTTTTCAAGGC | CATCAGGGCCTGAGCTCG |
| | CGTGCCCTTCACCTTCGGCCAGGGC | CRSSQSILHSNGNTYLEWYQQK | | TCCCACGTGCCCTTCACC | CCCGTCACAAAGAGCTTC |
| | ACCAAGCTGGAAATCAAACGAACTG | PGKAPKLLICKVSNRFSGVPSR | | TTCGGCCAGGGCACCAAG | AACAGGGGAGAGTGT |
| | TGGCTGCACCATCTGTCTTCATCTT | FSGSGSGTDFTLTISSLQPEDF | | CTGGAAATCAAA | (nucleotides 394 |
| | CCCGCCATCTGATGAGCAGTTGAAA | ATYYCFQGSHVPFTFGQGTKLE | | (nucleotides 58 to | to 714 of SEQ ID |
| | TCTGGAACTGCCTCTGTTGTGTGCC | IKRTVAAPSVFIFPPSDEQLKS | | 393 of SEQ ID NO: | NO: 512) |
| | TGCTGAATAACTTCTATCCCAGAGA | GTASVVCLLNNFYPREAKVQWK | | 512) | [SEQ ID NO: 519] |
| | GGCCAAAGTACAGTGGAAGGTGGAT | VDNALQSGNSQESVTEQDSKDS | | [SEQ ID NO: 517] | RTVAAPSVFIFPPSDEQL |
| | AACGCCCTCCAATCGGGTAACTCCC | TYSLSSTLTLSKADYEKHKVYA | | DVQMTQSPSSLSASVGDR | KSGTASVVCLLNNFYPRE |
| | AGGAGAGTGTCACAGAGCAGGACAG | CEVTHQGLSSPVTKSFNRGEC | | VTITCRSSQSILHSNGNT | AKVQWKVDNALQSGNSQE |
| | CAAGGACAGCACCTACAGCCTCAGC | | | YLEWYQQKPGKAPKLLIC | SVTEQDSKDSTYSLSSTL |
| | AGCACCCTGACGCTGAGCAAAGCAG | | | KVSNRFSGVPSRFSGSGS | TLSKADYEKHKVYACEVT |
| | ACTACGAGAAACACAAAGTCTACGC | | | GTDFTLTISSLQPEDFAT | HQGLSSPVTKSFNRGEC |
| | CTGCGAAGTCACCCATCAGGGCCTG | | | YYCFQGSHVPFTFGQGTK | [SEQ ID NO: 520] |
| | AGCTCGCCCGTCACAAAGAGCTTCA | | | LEIK | |
| | ACAGGGGAGAGTGTTGA | | | [SEQ ID NO: 518] | |
| | Without leader [SEQ ID | | | | |
| | NO: 513]: | | | | |
| | GACGTGCAGATGACCCAGTCCCCTT | | | | |
| | CCAGCCTGTCTGCCTCCGTGGGCGA | | | | |
| | CAGAGTGACCATCACCTGTCGGTCC | | | | |
| | TCCCAGTCCATCCTGCACTCCAACG | | | | |
| | GCAACACCTACCTGGAATGGTATCA | | | | |
| | GCAGAAGCCCGGCAAGGCCCCTAAG | | | | |
| | CTGCTGATCTGCAAGGTGTCCAACC | | | | |
| | GGTTCTCCGGCGTGCCCTCCAGATT | | | | |
| | CTCCGGCTCTGGCTCTGGCACCGAC | | | | |
| | TTCACCCTGACCATCTCCAGCCTCC | | | | |
| | AGCCCGAGGACTTCGCCACCTACTA | | | | |
| | CTGTTTTCAAGGCTCCCACGTGCCC | | | | |
| | TTCACCTTCGGCCAGGGCACCAAGC | | | | |
| | TGGAAATCAAACGAACTGTGGCTGC | | | | |
| | ACCATCTGTCTTCATCTTCCCGCCA | | | | |
| | TCTGATGAGCAGTTGAAATCTGGAA | | | | |
| | CTGCCTCTGTTGTGTGCCTGCTGAA | | | | |
| | TAACTTCTATCCCAGAGAGGCCAAA | | | | |
| | GTACAGTGGAAGGTGGATAACGCCC | | | | |
| | TCCAATCGGGTAACTCCCAGGAGAG | | | | |
| | TGTCACAGAGCAGGACAGCAAGGAC | | | | |
| | AGCACCTACAGCCTCAGCAGCACCC | | | | |
| | TGACGCTGAGCAAAGCAGACTACGA | | | | |
| | GAAACACAAAGTCTACGCCTGCGAA | | | | |
| | GTCACCCATCAGGGCCTGAGCTCGC | | | | |
| | CCGTCACAAAGAGCTTCAACAGGGG | | | | |
| | AGAGTGTTGA | | | | |
| 7G6- | With leader [SEQ ID NO: | With leader [SEQ ID | ATGGGCTG | GACGTGCAGATGACCCAG | CGAACTGTGGCTGCACCA |
| LCzu13 | 521]: | NO: 523]: | GTCCTGCA | TCCCCTTCCAGCCTGTCT | TCTGTCTTCATCTTCCCG |
| | ATGGGCTGGTCCTGCATCATCCTGT | MGWSCIILFLVATATGVHSDVQ | TCATCCTG | GCCTCCGTGGGCGACAGA | CCATCTGATGAGCAGTTG |
| | TTCTGGTGGCCACCGCCACCGGCGT | MTQSPSSLSASVGDRVTITCRS | TTTCTGGT | GTGACCATCACCTGTCGG | AAATCTGGAACTGCCTCT |
| | GCACAGCGACGTGCAGATGACCCAG | SQSILHSNGNTYLEWYQQKPGK | GGCCACCG | TCCTCCCAGTCCATCCTG | GTTGTGTGCCTGCTGAAT |
| | TCCCCTTCCAGCCTGTCTGCCTCCG | APKLLIYKVSNRFSGVPSRFSG | CCACCGGC | CACTCCAACGGCAACACC | AACTTCTATCCCAGAGAG |
| | TGGGCGACAGAGTGACCATCACCTG | SGSGTDFTLTISSLQPEDFATY | GTGCACAG | TACCTGGAATGGTATCAG | GCCAAAGTACAGTGGAAG |
| | TCGGTCCTCCCAGTCCATCCTGCAC | YCFQGSHVPFTFGQGTKLEIKR | C | CAGAAGCCCGGCAAGGCC | GTGGATAACGCCCTCCAA |
| | TCCAACGGCAACACCTACCTGGAAT | TVAAPSVFIFPPSDEQLKSGTA | (nucleo- | CCTAAGCTGCTGATCTAC | TCGGGTAACTCCCAGGAG |
| | GGTATCAGCAGAAGCCCGGCAAGGC | SVVCLLNNFYPREAKVQWKVDN | tides 1 | AAGGTGTCCAACCGGTTC | AGTGTCACAGAGCAGGAC |
| | CCCTAAGCTGCTGATCTACAAGGTG | ALQSGNSQESVTEQDSKDSTYS | to 57 of | TCCGGCGTGCCCTCCAGA | AGCAAGGACAGCACCTAC |
| | TCCAACCGGTTCTCCGGCGTGCCCT | LSSTLTLSKADYEKHKVYACEV | SEQ ID | TTCTCCGGCTCTGGCTCT | AGCCTCAGCAGCACCCTG |
| | CCAGATTCTCCGGCTCTGGCTCTGG | THQGLSSPVTKSFNRGEC | NO: 521) | GGCACCGACTTCACCCTG | ACGCTGAGCAAAGCAGAC |
| | CACCGACTTCACCCTGACCATCTCC | Without leader [SEQ ID | [SEQ ID | ACCATCTCCAGCCTCCAG | TACGAGAAACACAAAGTC |
| | AGCCTCCAGCCCGAGGACTTCGCCA | NO: 524]: | NO: 525] | CCCGAGGACTTCGCCACC | TACGCCTGCGAAGTCACC |
| | CCTACTACTGTTTTCAAGGCTCCCA | DVQMTQSPSSLSASVGDRVTIT | | TACTACTGTTTTCAAGGC | CATCAGGGCCTGAGCTCG |
| | CGTGCCCTTCACCTTCGGCCAGGGC | CRSSQSILHSNGNTYLEWYQQK | | TCCCACGTGCCCTTCACC | CCCGTCACAAAGAGCTTC |
| | ACCAAGCTGGAAATCAAACGAACTG | PGKAPKLLIYKVSNRFSGVPSR | | TTCGGCCAGGGCACCAAG | AACAGGGGAGAGTGT |
| | TGGCTGCACCATCTGTCTTCATCTT | FSGSGSGTDFTLTISSLQPEDF | | CTGGAAATCAAA | (nucleotides 394 |
| | CCCGCCATCTGATGAGCAGTTGAAA | ATYYCFQGSHVPFTFGQGTKLE | | (nucleotides 58 to | to 714 of SEQ ID |
| | TCTGGAACTGCCTCTGTTGTGTGCC | IKRTVAAPSVFIFPPSDEQLKS | | 393 of SEQ ID NO: | NO: 521) |
| | TGCTGAATAACTTCTATCCCAGAGA | GTASVVCLLNNFYPREAKVQWK | | 521) | [SEQ ID NO: 528] |
| | GGCCAAAGTACAGTGGAAGGTGGAT | VDNALQSGNSQESVTEQDSKDS | | [SEQ ID NO: 526] | RTVAAPSVFIFPPSDEQL |
| | AACGCCCTCCAATCGGGTAACTCCC | TYSLSSTLTLSKADYEKHKVYA | | DVQMTQSPSSLSASVGDR | KSGTASVVCLLNNFYPRE |
| | AGGAGAGTGTCACAGAGCAGGACAG | CEVTHQGLSSPVTKSFNRGEC | | VTITCRSSQSILHSNGNT | AKVQWKVDNALQSGNSQE |
| | CAAGGACAGCACCTACAGCCTCAGC | | | YLEWYQQKPGKAPKLLIY | SVTEQDSKDSTYSLSSTL |
| | AGCACCCTGACGCTGAGCAAAGCAG | | | KVSNRFSGVPSRFSGSGS | TLSKADYEKHKVYACEVT |
| | ACTACGAGAAACACAAAGTCTACGC | | | GTDFTLTISSLOPEDFAT | HQGLSSPVTKSFNRGEC |
| | CTGCGAAGTCACCCATCAGGGCCTG | | | YYCFQGSHVPFTFGQGTK | [SEQ ID NO: 529] |
| | AGCTCGCCCGTCACAAAGAGCTTCA | | | LEIK | |
| | ACAGGGGAGAGTGTTGA | | | [SEQ ID NO: 527] | |
| | Without leader [SEQ ID | | | | |
| | NO: 522]: | | | | |
| | GACGTGCAGATGACCCAGTCCCCTT | | | | |
| | CCAGCCTGTCTGCCTCCGTGGGCGA | | | | |
| | CAGAGTGACCATCACCTGTCGGTCC | | | | |
| | TCCCAGTCCATCCTGCACTCCAACG | | | | |
| | GCAACACCTACCTGGAATGGTATCA | | | | |
| | GCAGAAGCCCGGCAAGGCCCCTAAG | | | | |
| | CTGCTGATCTACAAGGTGTCCAACC | | | | |
| | GGTTCTCCGGCGTGCCCTCCAGATT | | | | |
| | CTCCGGCTCTGGCTCTGGCACCGAC | | | | |
| | TTCACCCTGACCATCTCCAGCCTCC | | | | |
| | AGCCCGAGGACTTCGCCACCTACTA | | | | |
| | CTGTTTTCAAGGCTCCCACGTGCCC | | | | |
| | TTCACCTTCGGCCAGGGCACCAAGC | | | | |
| | TGGAAATCAAACGAACTGTGGCTGC | | | | |
| | ACCATCTGTCTTCATCTTCCCGCCA | | | | |
| | TCTGATGAGCAGTTGAAATCTGGAA | | | | |
| | CTGCCTCTGTTGTGTGCCTGCTGAA | | | | |
| | TAACTTCTATCCCAGAGAGGCCAAA | | | | |
| | GTACAGTGGAAGGTGGATAACGCCC | | | | |
| | TCCAATCGGGTAACTCCCAGGAGAG | | | | |
| | TGTCACAGAGCAGGACAGCAAGGAC | | | | |
| | AGCACCTACAGCCTCAGCAGCACCC | | | | |
| | TGACGCTGAGCAAAGCAGACTACGA | | | | |
| | GAAACACAAAGTCTACGCCTGCGAA | | | | |
| | GTCACCCATCAGGGCCTGAGCTCGC | | | | |
| | CCGTCACAAAGAGCTTCAACAGGGG | | | | |
| | AGAGTGTTGA | | | | |
| 7G6- | With leader [SEQ ID NO: | With leader [SEQ ID | ATGGGCTG | GATATCCAGATGACCCAG | CGAACTGTGGCTGCACCA |
| LCzu14 | 530]: | NO: 532]: | GTCCTGCA | TCCCCTTCCAGCCTGTCC | TCTGTCTTCATCTTCCCG |
| | ATGGGCTGGTCCTGCATCATCCTGT | MGWSCIILFLVATATGVHSDIQ | TCATCCTG | GCCTCTGTGGGCGACAGA | CCATCTGATGAGCAGTTG |
| | TTCTGGTGGCCACCGCCACCGGCGT | MTQSPSSLSASVGDRVTITCRS | TTTCTGGT | GTGACCATCACCTGTCGG | AAATCTGGAACTGCCTCT |
| | GCACAGCGATATCCAGATGACCCAG | SQSILHSNGNTYLEWYQQKPGK | GGCCACCG | TCCTCCCAGTCCATCCTG | GTTGTGTGCCTGCTGAAT |
| | TCCCCTTCCAGCCTGTCCGCCTCTG | APKLLICKVSNRFSGVPSRFSG | CCACCGGC | CACTCCAACGGCAACACC | AACTTCTATCCCAGAGAG |
| | TGGGCGACAGAGTGACCATCACCTG | SGSGTDFTLTISSLOPEDFATY | GTGCACAG | TACCTGGAATGGTATCAG | GCCAAAGTACAGTGGAAG |
| | TCGGTCCTCCCAGTCCATCCTGCAC | YCFQGSHVPFTFGQGTKLEIKR | C | CAGAAGCCCGGCAAGGCC | GTGGATAACGCCCTCCAA |
| | TCCAACGGCAACACCTACCTGGAAT | TVAAPSVFIFPPSDEQLKSGTA | (nucleo- | CCTAAGCTGCTGATCTGC | TCGGGTAACTCCCAGGAG |
| | GGTATCAGCAGAAGCCCGGCAAGGC | SVVCLLNNFYPREAKVQWKVDN | tides 1 | AAGGTGTCCAACCGGTTC | AGTGTCACAGAGCAGGAC |
| | CCCTAAGCTGCTGATCTGCAAGGTG | ALQSGNSQESVTEQDSKDSTYS | to 57 of | TCCGGCGTGCCCTCCAGA | AGCAAGGACAGCACCTAC |
| | TCCAACCGGTTCTCCGGCGTGCCCT | LSSTLTLSKADYEKHKVYACEV | SEQ ID | TTCTCCGGCTCTGGCTCT | AGCCTCAGCAGCACCCTG |
| | CCAGATTCTCCGGCTCTGGCTCTGG | THQGLSSPVTKSFNRGEC | NO: 530) | GGCACCGACTTCACCCTG | ACGCTGAGCAAAGCAGAC |
| | CACCGACTTCACCCTGACCATCTCC | Without leader [SEQ ID | [SEQ ID | ACCATCTCCAGCCTCCAG | TACGAGAAACACAAAGTC |
| | AGCCTCCAGCCCGAGGACTTCGCCA | NO: 533]: | NO: 534] | CCCGAGGACTTCGCCACC | TACGCCTGCGAAGTCACC |
| | CCTACTACTGTTTTCAAGGCTCCCA | DIQMTQSPSSLSASVGDRVTIT | | TACTACTGTTTTCAAGGC | CATCAGGGCCTGAGCTCG |
| | CGTGCCCTTCACCTTCGGCCAGGGC | CRSSQSILHSNGNTYLEWYQQK | | TCCCACGTGCCCTTCACC | CCCGTCACAAAGAGCTTC |
| | ACCAAGCTGGAAATCAAACGAACTG | PGKAPKLLICKVSNRFSGVPSR | | TTCGGCCAGGGCACCAAG | AACAGGGGAGAGTGTTGA |
| | TGGCTGCACCATCTGTCTTCATCTT | FSGSGSGTDFTLTISSLQPEDF | | CTGGAAATCAAA | (nucleotides 394 |
| | CCCGCCATCTGATGAGCAGTTGAAA | ATYYCFQGSHVPFTFGQGTKLE | | (nucleotides 58 to | to 714 of SEQ ID |
| | TCTGGAACTGCCTCTGTTGTGTGCC | IKRTVAAPSVFIFPPSDEQLKS | | 393 of SEQ ID NO: | NO: 530) |
| | TGCTGAATAACTTCTATCCCAGAGA | GTASVVCLLNNFYPREAKVQWK | | 530) | [SEQ ID NO: 537] |
| | GGCCAAAGTACAGTGGAAGGTGGAT | VDNALQSGNSQESVTEQDSKDS | | [SEQ ID NO: 535] | RTVAAPSVFIFPPSDEQL |
| | AACGCCCTCCAATCGGGTAACTCCC | TYSLSSTLTLSKADYEKHKVYA | | DIQMTQSPSSLSASVGDR | KSGTASVVCLLNNFYPRE |
| | AGGAGAGTGTCACAGAGCAGGACAG | CEVTHQGLSSPVTKSFNRGEC | | VTITCRSSQSILHSNGNT | AKVQWKVDNALQSGNSQE |
| | CAAGGACAGCACCTACAGCCTCAGC | | | YLEWYQQKPGKAPKLLIC | SVTEQDSKDSTYSLSSTL |
| | AGCACCCTGACGCTGAGCAAAGCAG | | | KVSNRFSGVPSRFSGSGS | TLSKADYEKHKVYACEVT |
| | ACTACGAGAAACACAAAGTCTACGC | | | GTDFTLTISSLOPEDFAT | HQGLSSPVTKSFNRGEC |
| | CTGCGAAGTCACCCATCAGGGCCTG | | | YYCFQGSHVPFTFGQGTK | [SEQ ID NO: 538] |
| | AGCTCGCCCGTCACAAAGAGCTTCA | | | LEIK | |
| | ACAGGGGAGAGTGTTGA | | | [SEQ ID NO: 536] | |
| | Without leader [SEQ ID | | | | |
| | NO: 531]: | | | | |
| | GATATCCAGATGACCCAGTCCCCTT | | | | |
| | CCAGCCTGTCCGCCTCTGTGGGCGA | | | | |
| | CAGAGTGACCATCACCTGTCGGTCC | | | | |
| | TCCCAGTCCATCCTGCACTCCAACG | | | | |
| | GCAACACCTACCTGGAATGGTATCA | | | | |
| | GCAGAAGCCCGGCAAGGCCCCTAAG | | | | |
| | CTGCTGATCTGCAAGGTGTCCAACC | | | | |
| | GGTTCTCCGGCGTGCCCTCCAGATT | | | | |
| | CTCCGGCTCTGGCTCTGGCACCGAC | | | | |
| | TTCACCCTGACCATCTCCAGCCTCC | | | | |
| | AGCCCGAGGACTTCGCCACCTACTA | | | | |
| | CTGTTTTCAAGGCTCCCACGTGCCC | | | | |
| | TTCACCTTCGGCCAGGGCACCAAGC | | | | |
| | TGGAAATCAAACGAACTGTGGCTGC | | | | |
| | ACCATCTGTCTTCATCTTCCCGCCA | | | | |
| | TCTGATGAGCAGTTGAAATCTGGAA | | | | |
| | CTGCCTCTGTTGTGTGCCTGCTGAA | | | | |
| | TAACTTCTATCCCAGAGAGGCCAAA | | | | |
| | GTACAGTGGAAGGTGGATAACGCCC | | | | |
| | TCCAATCGGGTAACTCCCAGGAGAG | | | | |
| | TGTCACAGAGCAGGACAGCAAGGAC | | | | |
| | AGCACCTACAGCCTCAGCAGCACCC | | | | |
| | TGACGCTGAGCAAAGCAGACTACGA | | | | |
| | GAAACACAAAGTCTACGCCTGCGAA | | | | |
| | GTCACCCATCAGGGCCTGAGCTCGC | | | | |
| | CCGTCACAAAGAGCTTCAACAGGGG | | | | |
| | AGAGTGTTGA | | | | |
| 7G6- | With leader [SEQ ID NO: | With leader [SEQ ID O: | ATGGGCTG | GACGTGCAGATGACCCAG | CGAACTGTGGCTGCACCA |
| LCzu15 | 539]: | 541]: | GTCCTGCA | TCCCCTTCCAGCCTGTCT | TCTGTCTTCATCTTCCCG |
| | ATGGGCTGGTCCTGCATCATCCTGT | MGWSCIILFLVATATGVHSDVQ | TCATCCTG | GCCTCCGTGGGCGACAGA | CCATCTGATGAGCAGTTG |
| | TTCTGGTGGCCACCGCCACCGGCGT | MTQSPSSLSASVGDRVTITCRS | TTTCTGGT | GTGACCATCACCTGTCGG | AAATCTGGAACTGCCTCT |
| | GCACAGCGACGTGCAGATGACCCAG | SQSILHSNGNTYLEWYQQKPGK | GGCCACCG | TCCTCCCAGTCCATCCTG | GTTGTGTGCCTGCTGAAT |
| | TCCCCTTCCAGCCTGTCTGCCTCCG | APKLLISKVSNRFSGVPSRFSG | CCACCGGC | CACTCCAACGGCAACACC | AACTTCTATCCCAGAGAG |
| | TGGGCGACAGAGTGACCATCACCTG | SGSGTDFTLTISSLOPEDFATY | GTGCACAG | TACCTGGAATGGTATCAG | GCCAAAGTACAGTGGAAG |
| | TCGGTCCTCCCAGTCCATCCTGCAC | YCFQGSHVPFTFGQGTKLEIKR | C | CAGAAGCCCGGCAAGGCC | GTGGATAACGCCCTCCAA |
| | TCCAACGGCAACACCTACCTGGAAT | TVAAPSVFIFPPSDEQLKSGTA | (nucleot | CCTAAGCTGCTGATCTCC | TCGGGTAACTCCCAGGAG |
| | GGTATCAGCAGAAGCCCGGCAAGGC | SVVCLLNNFYPREAKVQWKVDN | ides: | AAGGTGTCCAACCGGTTC | AGTGTCACAGAGCAGGAC |
| | CCCTAAGCTGCTGATCTCCAAGGTG | ALQSGNSQESVTEQDSKDSTYS | to 57 of | TCCGGCGTGCCCTCCAGA | AGCAAGGACAGCACCTAC |
| | TCCAACCGGTTCTCCGGCGTGCCCT | LSSTLTLSKADYEKHKVYACEV | SEQ ID | TTCTCCGGCTCTGGCTCT | AGCCTCAGCAGCACCCTG |
| | CCAGATTCTCCGGCTCTGGCTCTGG | THQGLSSPVTKSFNRGEC | NO: 539) | GGCACCGACTTCACCCTG | ACGCTGAGCAAAGCAGAC |
| | CACCGACTTCACCCTGACCATCTCC | Without leader [SEQ ID | [SEQ ID | ACCATCTCCAGCCTCCAG | TACGAGAAACACAAAGTC |
| | AGCCTCCAGCCCGAGGACTTCGCCA | NO: 542]: | NO: 543] | CCCGAGGACTTCGCCACC | TACGCCTGCGAAGTCACC |
| | CCTACTACTGTTTTCAAGGCTCCCA | DVQMTQSPSSLSASVGDRVTIT | | TACTACTGTTTTCAAGGC | CATCAGGGCCTGAGCTCG |
| | CGTGCCCTTCACCTTCGGCCAGGGC | CRSSQSILHSNGNTYLEWYQQK | | TCCCACGTGCCCTTCACC | CCCGTCACAAAGAGCTTC |
| | ACCAAGCTGGAAATCAAACGAACTG | PGKAPKLLISKVSNRFSGVPSR | | TTCGGCCAGGGCACCAAG | AACAGGGGAGAGTGT |
| | TGGCTGCACCATCTGTCTTCATCTT | FSGSGSGTDFTLTISSLQPEDF | | CTGGAAATCAAA | (nucleotides 394 |
| | CCCGCCATCTGATGAGCAGTTGAAA | ATYYCFQGSHVPFTFGQGTKLE | | (nucleotides 58 to | to 714 of SEQ ID |
| | TCTGGAACTGCCTCTGTTGTGTGCC | IKRTVAAPSVFIFPPSDEQLKS | | 393 of SEQ ID NO: | NO: 539) |
| | TGCTGAATAACTTCTATCCCAGAGA | GTASVVCLLNNFYPREAKVQWK | | 539) | [SEQ ID NO: 546] |
| | GGCCAAAGTACAGTGGAAGGTGGAT | VDNALQSGNSQESVTEQDSKDS | | [SEQ ID NO: 544] | RTVAAPSVFIFPPSDEQL |
| | AACGCCCTCCAATCGGGTAACTCCC | TYSLSSTLTLSKADYEKHKVYA | | DVQMTQSPSSLSASVGDR | KSGTASVVCLLNNFYPRE |
| | AGGAGAGTGTCACAGAGCAGGACAG | CEVTHQGLSSPVTKSFNRGEC | | VTITCRSSQSILHSNGNT | AKVQWKVDNALQSGNSQE |
| | CAAGGACAGCACCTACAGCCTCAGC | | | YLEWYQQKPGKAPKLLIS | SVTEQDSKDSTYSLSSTL |
| | AGCACCCTGACGCTGAGCAAAGCAG | | | KVSNRFSGVPSRFSGSGS | TLSKADYEKHKVYACEVT |
| | ACTACGAGAAACACAAAGTCTACGC | | | GTDFTLTISSLOPEDFAT | HQGLSSPVTKSFNRGEC |
| | CTGCGAAGTCACCCATCAGGGCCTG | | | YYCFQGSHVPFTFGQGTK | [SEQ ID NO: 547] |
| | AGCTCGCCCGTCACAAAGAGCTTCA | | | LEIK | |
| | ACAGGGGAGAGTGTTGA | | | [SEQ ID NO: 545] | |
| | Without leader [SEQ ID | | | | |
| | NO: 540]: | | | | |
| | GACGTGCAGATGACCCAGTCCCCTT | | | | |
| | CCAGCCTGTCTGCCTCCGTGGGCGA | | | | |
| | CAGAGTGACCATCACCTGTCGGTCC | | | | |
| | TCCCAGTCCATCCTGCACTCCAACG | | | | |
| | GCAACACCTACCTGGAATGGTATCA | | | | |
| | GCAGAAGCCCGGCAAGGCCCCTAAG | | | | |
| | CTGCTGATCTCCAAGGTGTCCAACC | | | | |
| | GGTTCTCCGGCGTGCCCTCCAGATT | | | | |
| | CTCCGGCTCTGGCTCTGGCACCGAC | | | | |
| | TTCACCCTGACCATCTCCAGCCTCC | | | | |
| | AGCCCGAGGACTTCGCCACCTACTA | | | | |
| | CTGTTTTCAAGGCTCCCACGTGCCC | | | | |
| | TTCACCTTCGGCCAGGGCACCAAGC | | | | |
| | TGGAAATCAAACGAACTGTGGCTGC | | | | |
| | ACCATCTGTCTTCATCTTCCCGCCA | | | | |
| | TCTGATGAGCAGTTGAAATCTGGAA | | | | |
| | CTGCCTCTGTTGTGTGCCTGCTGAA | | | | |
| | TAACTTCTATCCCAGAGAGGCCAAA | | | | |
| | GTACAGTGGAAGGTGGATAACGCCC | | | | |
| | TCCAATCGGGTAACTCCCAGGAGAG | | | | |
| | TGTCACAGAGCAGGACAGCAAGGAC | | | | |
| | AGCACCTACAGCCTCAGCAGCACCC | | | | |
| | TGACGCTGAGCAAAGCAG | | | | |
| 7G6- | With leader [SEQ ID NO: | With leader [SEQ ID | ATGGGCTG | GACGTGCAGATGACCCAG | CGAACTGTGGCTGCACCA |
| LCzu16 | 548]: | NO: 550]: | GTCCTGCA | TCCCCTTCCAGCCTGTCT | TCTGTCTTCATCTTCCCG |
| | ATGGGCTGGTCCTGCATCATCCTGT | MGWSCIILFLVATATGVHSDVQ | TCATCCTG | GCCTCCGTGGGCGACAGA | CCATCTGATGAGCAGTTG |
| | TTCTGGTGGCCACCGCCACCGGCGT | MTQSPSSLSASVGDRVTITCRS | TTTCTGGT | GTGACCATCACCTGTCGG | AAATCTGGAACTGCCTCT |
| | GCACAGCGACGTGCAGATGACCCAG | SQSIVHSNGNTYLEWYQQKPGK | GGCCACCG | TCCTCCCAGTCCATCGTG | GTTGTGTGCCTGCTGAAT |
| | TCCCCTTCCAGCCTGTCTGCCTCCG | APKLLISKVSNRFSGVPSRFSG | CCACCGGC | CACTCCAACGGCAACACC | AACTTCTATCCCAGAGAG |
| | TGGGCGACAGAGTGACCATCACCTG | SGSGTDFTLTISSLOPEDFATY | GTGCACAG | TACCTGGAATGGTATCAG | GCCAAAGTACAGTGGAAG |
| | TCGGTCCTCCCAGTCCATCGTGCAC | YCFQGSHVPFTFGQGTKLEIKR | C | CAGAAGCCCGGCAAGGCC | GTGGATAACGCCCTCCAA |
| | TCCAACGGCAACACCTACCTGGAAT | TVAAPSVFIFPPSDEQLKSGTA | (nucleo- | CCTAAGCTGCTGATCTCC | TCGGGTAACTCCCAGGAG |
| | GGTATCAGCAGAAGCCCGGCAAGGC | SVVCLLNNFYPREAKVQWKVDN | tides 1 | AAGGTGTCCAACCGGTTC | AGTGTCACAGAGCAGGAC |
| | CCCTAAGCTGCTGATCTCCAAGGTG | ALQSGNSQESVTEQDSKDSTYS | to 57 of | TCCGGCGTGCCCTCCAGA | AGCAAGGACAGCACCTAC |
| | TCCAACCGGTTCTCCGGCGTGCCCT | LSSTLTLSKADYEKHKVYACEV | SEQ ID | TTCTCCGGCTCTGGCTCT | AGCCTCAGCAGCACCCTG |
| | CCAGATTCTCCGGCTCTGGCTCTGG | THQGLSSPVTKSFNRGEC | NO: 548) | GGCACCGACTTCACCCTG | ACGCTGAGCAAAGCAGAC |
| | CACCGACTTCACCCTGACCATCTCC | Without leader [SEQ ID | [SEQ ID | ACCATCTCCAGCCTCCAG | TACGAGAAACACAAAGTC |
| | AGCCTCCAGCCCGAGGACTTCGCCA | NO: 551]: | NO: 552] | CCCGAGGACTTCGCCACC | TACGCCTGCGAAGTCACC |
| | CCTACTACTGTTTTCAAGGCTCCCA | DVQMTQSPSSLSASVGDRVTIT | | TACTACTGTTTTCAAGGC | CATCAGGGCCTGAGCTCG |
| | CGTGCCCTTCACCTTCGGCCAGGGC | CRSSQSIVHSNGNTYLEWYQQK | | TCCCACGTGCCCTTCACC | CCCGTCACAAAGAGCTTC |
| | ACCAAGCTGGAAATCAAACGAACTG | PGKAPKLLISKVSNRFSGVPSR | | TTCGGCCAGGGCACCAAG | AACAGGGGAGAGTGT |
| | TGGCTGCACCATCTGTCTTCATCTT | FSGSGSGTDFTLTISSLQPEDF | | CTGGAAATCAAA | (nucleotides 394 |
| | CCCGCCATCTGATGAGCAGTTGAAA | ATYYCFQGSHVPFTFGQGTKLE | | (nucleotides 58 to | to 714 of SEQ ID |
| | TCTGGAACTGCCTCTGTTGTGTGCC | IKRTVAAPSVFIFPPSDEQLKS | | 393 of SEQ ID NO: | NO: 548) |
| | TGCTGAATAACTTCTATCCCAGAGA | GTASVVCLLNNFYPREAKVQWK | | 548) | [SEQ ID NO: 555] |
| | GGCCAAAGTACAGTGGAAGGTGGAT | VDNALQSGNSQESVTEQDSKDS | | [SEQ ID NO: 553] | RTVAAPSVFIFPPSDEQL |
| | AACGCCCTCCAATCGGGTAACTCCC | TYSLSSTLTLSKADYEKHKVYA | | DVQMTQSPSSLSASVGDR | KSGTASVVCLLNNFYPRE |
| | AGGAGAGTGTCACAGAGCAGGACAG | CEVTHQGLSSPVTKSFNRGEC | | VTITCRSSQSIVHSNGNT | AKVQWKVDNALQSGNSQE |
| | CAAGGACAGCACCTACAGCCTCAGC | | | YLEWYQQKPGKAPKLLIS | SVTEQDSKDSTYSLSSTL |
| | AGCACCCTGACGCTGAGCAAAGCAG | | | KVSNRFSGVPSRFSGSGS | TLSKADYEKHKVYACEVT |
| | ACTACGAGAAACACAAAGTCTACGC | | | GTDFTLTISSLOPEDFAT | HQGLSSPVTKSFNRGEC |
| | CTGCGAAGTCACCCATCAGGGCCTG | | | YYCFQGSHVPFTFGQGTK | [SEQ ID NO: 556] |
| | AGCTCGCCCGTCACAAAGAGCTTCA | | | LEIK | |
| | ACAGGGGAGAGTGTTGA | | | [SEQ ID NO: 554] | |
| | Without leader [SEQ ID | | | | |
| | NO: 549]: | | | | |
| | GACGTGCAGATGACCCAGTCCCCTT | | | | |
| | CCAGCCTGTCTGCCTCCGTGGGCGA | | | | |
| | CAGAGTGACCATCACCTGTCGGTCC | | | | |
| | TCCCAGTCCATCGTGCACTCCAACG | | | | |
| | GCAACACCTACCTGGAATGGTATCA | | | | |
| | GCAGAAGCCCGGCAAGGCCCCTAAG | | | | |
| | CTGCTGATCTCCAAGGTGTCCAACC | | | | |
| | GGTTCTCCGGCGTGCCCTCCAGATT | | | | |
| | CTCCGGCTCTGGCTCTGGCACCGAC | | | | |
| | TTCACCCTGACCATCTCCAGCCTCC | | | | |
| | AGCCCGAGGACTTCGCCACCTACTA | | | | |
| | CTGTTTTCAAGGCTCCCACGTGCCC | | | | |
| | TTCACCTTCGGCCAGGGCACCAAGC | | | | |
| | TGGAAATCAAACGAACTGTGGCTGC | | | | |
| | ACCATCTGTCTTCATCTTCCCGCCA | | | | |
| | TCTGATGAGCAGTTGAAATCTGGAA | | | | |
| | CTGCCTCTGTTGTGTGCCTGCTGAA | | | | |
| | TAACTTCTATCCCAGAGAGGCCAAA | | | | |
| | GTACAGTGGAAGGTGGATAACGCCC | | | | |
| | TCCAATCGGGTAACTCCCAGGAGAG | | | | |
| | TGTCACAGAGCAGGACAGCAAGGAC | | | | |
| | AGCACCTACAGCCTCAGCAGCACCC | | | | |
| | TGACGCTGAGCAAAGCAGACTACGA | | | | |
| | GAAACACAAAGTCTACGCCTGCGAA | | | | |
| | GTCACCCATCAGGGCCTGAGCTCGC | | | | |
| | CCGTCACAAAGAGCTTCAACAGGGG | | | | |
| | AGAGTGTTGA | | | | |
| 7G6- | With leader [SEQ ID NO: | With leader [SEQ ID | ATGGGCTG | GACGTGCAGATGACCCAG | CGAACTGTGGCTGCACCA |
| LCzu17 | 557]: | NO: 559]: | GTCCTGCA | TCCCCTTCCAGCCTGTCT | TCTGTCTTCATCTTCCCG |
| | ATGGGCTGGTCCTGCATCATCCTGT | MGWSCIILFLVATATGVHSDVQ | TCATCCTG | GCCTCCGTGGGCGACAGA | CCATCTGATGAGCAGTTG |
| | TTCTGGTGGCCACCGCCACCGGCGT | MTQSPSSLSASVGDRVTITCRS | TTTCTGGT | GTGACCATCACCTGTCGG | AAATCTGGAACTGCCTCT |
| | GCACAGCGACGTGCAGATGACCCAG | SQSIVHSNGNTYLNWYQQKPGK | GGCCACCG | TCCTCCCAGTCCATCGTG | GTTGTGTGCCTGCTGAAT |
| | TCCCCTTCCAGCCTGTCTGCCTCCG | APKLLISKVSNRFSGVPSRFSG | CCACCGGC | CACTCCAACGGCAACACC | AACTTCTATCCCAGAGAG |
| | TGGGCGACAGAGTGACCATCACCTG | SGSGTDFTLTISSLOPEDFATY | GTGCACAG | TACCTGAACTGGTATCAG | GCCAAAGTACAGTGGAAG |
| | TCGGTCCTCCCAGTCCATCGTGCAC | YCFQGSHVPFTFGQGTKLEIKR | C | CAGAAGCCCGGCAAGGCC | GTGGATAACGCCCTCCAA |
| | TCCAACGGCAACACCTACCTGAACT | TVAAPSVFIFPPSDEQLKSGTA | (nucleo- | CCTAAGCTGCTGATCTCC | TCGGGTAACTCCCAGGAG |
| | GGTATCAGCAGAAGCCCGGCAAGGC | SVVCLLNNFYPREAKVQWKVDN | tides 1 | AAGGTGTCCAACCGGTTC | AGTGTCACAGAGCAGGAC |
| | CCCTAAGCTGCTGATCTCCAAGGTG | ALQSGNSQESVTEQDSKDSTYS | to 57 of | TCCGGCGTGCCCTCCAGA | AGCAAGGACAGCACCTAC |
| | TCCAACCGGTTCTCCGGCGTGCCCT | LSSTLTLSKADYEKHKVYACEV | SEQ ID | TTCTCCGGCTCTGGCTCT | AGCCTCAGCAGCACCCTG |
| | CCAGATTCTCCGGCTCTGGCTCTGG | THQGLSSPVTKSFNRGEC | NO: 557) | GGCACCGACTTCACCCTG | ACGCTGAGCAAAGCAGAC |
| | CACCGACTTCACCCTGACCATCTCC | Without leader [SEQ ID | [SEQ ID | ACCATCTCCAGCCTCCAG | TACGAGAAACACAAAGTC |
| | AGCCTCCAGCCCGAGGACTTCGCCA | NO: 560]: | NO: 561] | CCCGAGGACTTCGCCACC | TACGCCTGCGAAGTCACC |
| | CCTACTACTGTTTTCAAGGCTCCCA | DVQMTQSPSSLSASVGDRVTIT | | TACTACTGTTTTCAAGGC | CATCAGGGCCTGAGCTCG |
| | CGTGCCCTTCACCTTCGGCCAGGGC | CRSSQSIVHSNGNTYLNWYQQK | | TCCCACGTGCCCTTCACC | CCCGTCACAAAGAGCTTC |
| | ACCAAGCTGGAAATCAAACGAACTG | PGKAPKLLISKVSNRFSGVPSR | | TTCGGCCAGGGCACCAAG | AACAGGGGAGAGTGTTGA |
| | TGGCTGCACCATCTGTCTTCATCTT | FSGSGSGTDFTLTISSLQPEDF | | CTGGAAATCAAA | (nucleotides 394 |
| | CCCGCCATCTGATGAGCAGTTGAAA | ATYYCFQGSHVPFTFGQGTKLE | | (nucleotides 58 to | to 714 of SEQ ID |
| | TCTGGAACTGCCTCTGTTGTGTGCC | IKRTVAAPSVFIFPPSDEQLKS | | 393 of SEQ ID NO: | NO: 557) |
| | TGCTGAATAACTTCTATCCCAGAGA | GTASVVCLLNNFYPREAKVQWK | | 557) | [SEQ ID NO: 564] |
| | GGCCAAAGTACAGTGGAAGGTGGAT | VDNALQSGNSQESVTEQDSKDS | | [SEQ ID NO: 562] | RTVAAPSVFIFPPSDEQL |
| | AACGCCCTCCAATCGGGTAACTCCC | TYSLSSTLTLSKADYEKHKVYA | | DVQMTQSPSSLSASVGDR | KSGTASVVCLLNNFYPRE |
| | AGGAGAGTGTCACAGAGCAGGACAG | CEVTHQGLSSPVTKSFNRGEC | | VTITCRSSQSIVHSNGNT | AKVQWKVDNALQSGNSQE |
| | CAAGGACAGCACCTACAGCCTCAGC | | | YLNWYQQKPGKAPKLLIS | SVTEQDSKDSTYSLSSTL |
| | AGCACCCTGACGCTGAGCAAAGCAG | | | KVSNRFSGVPSRFSGSGS | TLSKADYEKHKVYACEVT |
| | ACTACGAGAAACACAAAGTCTACGC | | | GTDFTLTISSLQPEDFAT | HQGLSSPVTKSFNRGEC |
| | CTGCGAAGTCACCCATCAGGGCCTG | | | YYCFQGSHVPFTFGQGTK | [SEQ ID NO: 565] |
| | AGCTCGCCCGTCACAAAGAGCTTCA | | | LEIK | |
| | ACAGGGGAGAGTGTTGA | | | [SEQ ID NO: 563] | |
| | Without leader [SEQ ID | | | | |
| | NO: 558]: | | | | |
| | GACGTGCAGATGACCCAGTCCCCTT | | | | |
| | CCAGCCTGTCTGCCTCCGTGGGCGA | | | | |
| | CAGAGTGACCATCACCTGTCGGTCC | | | | |
| | TCCCAGTCCATCGTGCACTCCAACG | | | | |
| | GCAACACCTACCTGAACTGGTATCA | | | | |
| | GCAGAAGCCCGGCAAGGCCCCTAAG | | | | |
| | CTGCTGATCTCCAAGGTGTCCAACC | | | | |
| | GGTTCTCCGGCGTGCCCTCCAGATT | | | | |
| | CTCCGGCTCTGGCTCTGGCACCGAC | | | | |
| | TTCACCCTGACCATCTCCAGCCTCC | | | | |
| | AGCCCGAGGACTTCGCCACCTACTA | | | | |
| | CTGTTTTCAAGGCTCCCACGTGCCC | | | | |
| | TTCACCTTCGGCCAGGGCACCAAGC | | | | |
| | TGGAAATCAAACGAACTGTGGCTGC | | | | |
| | ACCATCTGTCTTCATCTTCCCGCCA | | | | |
| | TCTGATGAGCAGTTGAAATCTGGAA | | | | |
| | CTGCCTCTGTTGTGTGCCTGCTGAA | | | | |
| | TAACTTCTATCCCAGAGAGGCCAAA | | | | |
| | GTACAGTGGAAGGTGGATAACGCCC | | | | |
| | TCCAATCGGGTAACTCCCAGGAGAG | | | | |
| | TGTCACAGAGCAGGACAGCAAGGAC | | | | |
| | AGCACCTACAGCCTCAGCAGCACCC | | | | |
| | TGACGCTGAGCAAAGCAGACTACGA | | | | |
| | GAAACACAAAGTCTACGCCTGCGAA | | | | |
| | GTCACCCATCAGGGCCTGAGCTCGC | | | | |
| | CCGTCACAAAGAGCTTCAACAGGGG | | | | |
| | AGAGTGTTGA | | | | |
| 7G6- | With leader [SEQ ID NO: | With leader [SEQ ID | ATGGGCTG | GATATCCAGATGACCCAG | CGAACTGTGGCTGCACCA |
| LCzu18 | 566]: | NO: 568]: | GTCCTGCA | TCCCCTTCCAGCCTGTCC | TCTGTCTTCATCTTCCCG |
| | ATGGGCTGGTCCTGCATCATCCTGT | MGWSCIILFLVATATGVHSDIQ | TCATCCTG | GCCTCTGTGGGCGACAGA | CCATCTGATGAGCAGTTG |
| | TTCTGGTGGCCACCGCCACCGGCGT | MTQSPSSLSASVGDRVTITCRS | TTTCTGGT | GTGACCATCACCTGTCGG | AAATCTGGAACTGCCTCT |
| | GCACAGCGATATCCAGATGACCCAG | SQSILHSNGNTYLEWYQQKPGK | GGCCACCG | TCCTCCCAGTCCATCCTG | GTTGTGTGCCTGCTGAAT |
| | TCCCCTTCCAGCCTGTCCGCCTCTG | APKLLISKVSNRFSGVPSRFSG | CCACCGGC | CACTCCAACGGCAACACC | AACTTCTATCCCAGAGAG |
| | TGGGCGACAGAGTGACCATCACCTG | SGSGTDFTLTISSLOPEDFATY | GTGCACAG | TACCTGGAATGGTATCAG | GCCAAAGTACAGTGGAAG |
| | TCGGTCCTCCCAGTCCATCCTGCAC | YCFQGSHVPFTFGQGTKLEIKR | C | CAGAAGCCCGGCAAGGCC | GTGGATAACGCCCTCCAA |
| | TCCAACGGCAACACCTACCTGGAAT | TVAAPSVFIFPPSDEQLKSGTA | (nucleo- | CCTAAGCTGCTGATCTCC | TCGGGTAACTCCCAGGAG |
| | GGTATCAGCAGAAGCCCGGCAAGGC | SVVCLLNNFYPREAKVQWKVDN | tides 1 | AAGGTGTCCAACCGGTTC | AGTGTCACAGAGCAGGAC |
| | CCCTAAGCTGCTGATCTCCAAGGTG | ALQSGNSQESVTEQDSKDSTYS | to 57 of | TCCGGCGTGCCCTCCAGA | AGCAAGGACAGCACCTAC |
| | TCCAACCGGTTCTCCGGCGTGCCCT | LSSTLTLSKADYEKHKVYACEV | SEQ ID | TTCTCCGGCTCTGGCTCT | AGCCTCAGCAGCACCCTG |
| | CCAGATTCTCCGGCTCTGGCTCTGG | THQGLSSPVTKSFNRGEC | NO: 566) | GGCACCGACTTCACCCTG | ACGCTGAGCAAAGCAGAC |
| | CACCGACTTCACCCTGACCATCTCC | Without leader [SEQ ID | [SEQ ID | ACCATCTCCAGCCTCCAG | TACGAGAAACACAAAGTC |
| | AGCCTCCAGCCCGAGGACTTCGCCA | NO: 569]: | NO: 570] | CCCGAGGACTTCGCCACC | TACGCCTGCGAAGTCACC |
| | CCTACTACTGTTTTCAAGGCTCCCA | DIQMTQSPSSLSASVGDRVTIT | | TACTACTGTTTTCAAGGC | CATCAGGGCCTGAGCTCG |
| | CGTGCCCTTCACCTTCGGCCAGGGC | CRSSQSILHSNGNTYLEWYQQK | | TCCCACGTGCCCTTCACC | CCCGTCACAAAGAGCTTC |
| | ACCAAGCTGGAAATCAAACGAACTG | PGKAPKLLISKVSNRFSGVPSR | | TTCGGCCAGGGCACCAAG | AACAGGGGAGAGTGTTGA |
| | TGGCTGCACCATCTGTCTTCATCTT | FSGSGSGTDFTLTISSLQPEDF | | CTGGAAATCAAA | (nucleotides 394 |
| | CCCGCCATCTGATGAGCAGTTGAAA | ATYYCFQGSHVPFTFGQGTKLE | | (nucleotides 58 to | to 714 of SEQ ID |
| | TCTGGAACTGCCTCTGTTGTGTGCC | IKRTVAAPSVFIFPPSDEQLKS | | 393 of SEQ ID NO: | NO: 566) [SEQ ID |
| | TGCTGAATAACTTCTATCCCAGAGA | GTASVVCLLNNFYPREAKVQWK | | 566) | NO: 573] |
| | GGCCAAAGTACAGTGGAAGGTGGAT | VDNALQSGNSQESVTEQDSKDS | | [SEQ ID NO: 571] | RTVAAPSVFIFPPSDEQL |
| | AACGCCCTCCAATCGGGTAACTCCC | TYSLSSTLTLSKADYEKHKVYA | | DIQMTQSPSSLSASVGDR | KSGTASVVCLLNNFYPRE |
| | AGGAGAGTGTCACAGAGCAGGACAG | CEVTHQGLSSPVTKSFNRGEC | | VTITCRSSQSILHSNGNT | AKVQWKVDNALQSGNSQE |
| | CAAGGACAGCACCTACAGCCTCAGC | | | YLEWYQQKPGKAPKLLIS | SVTEQDSKDSTYSLSSTL |
| | AGCACCCTGACGCTGAGCAAAGCAG | | | KVSNRFSGVPSRFSGSGS | TLSKADYEKHKVYACEVT |
| | ACTACGAGAAACACAAAGTCTACGC | | | GTDFTLTISSLQPEDFAT | HQGLSSPVTKSFNRGEC |
| | CTGCGAAGTCACCCATCAGGGCCTG | | | YYCFQGSHVPFTFGQGTK | [SEQ ID NO: 574] |
| | AGCTCGCCCGTCACAAAGAGCTTCA | | | LEIK | |
| | ACAGGGGAGAGTGTTGA | | | [SEQ ID NO: 572] | |
| | NO: 567]: | | | | |
| | GATATCCAGATGACCCAGTCCCCTT | | | | |
| | CCAGCCTGTCCGCCTCTGTGGGCGA | | | | |
| | CAGAGTGACCATCACCTGTCGGTCC | | | | |
| | TCCCAGTCCATCCTGCACTCCAACG | | | | |
| | GCAACACCTACCTGGAATGGTATCA | | | | |
| | GCAGAAGCCCGGCAAGGCCCCTAAG | | | | |
| | CTGCTGATCTCCAAGGTGTCCAACC | | | | |
| | GGTTCTCCGGCGTGCCCTCCAGATT | | | | |
| | CTCCGGCTCTGGCTCTGGCACCGAC | | | | |
| | TTCACCCTGACCATCTCCAGCCTCC | | | | |
| | AGCCCGAGGACTTCGCCACCTACTA | | | | |
| | CTGTTTTCAAGGCTCCCACGTGCCC | | | | |
| | TTCACCTTCGGCCAGGGCACCAAGC | | | | |
| | TGGAAATCAAACGAACTGTGGCTGC | | | | |
| | ACCATCTGTCTTCATCTTCCCGCCA | | | | |
| | TCTGATGAGCAGTTGAAATCTGGAA | | | | |
| | CTGCCTCTGTTGTGTGCCTGCTGAA | | | | |
| | TAACTTCTATCCCAGAGAGGCCAAA | | | | |
| | GTACAGTGGAAGGTGGATAACGCCC | | | | |
| | TCCAATCGGGTAACTCCCAGGAGAG | | | | |
| | TGTCACAGAGCAGGACAGCAAGGAC | | | | |
| | AGCACCTACAGCCTCAGCAGCACCC | | | | |
| | TGACGCTGAGCAAAGCAGACTACGA | | | | |
| | GAAACACAAAGTCTACGCCTGCGAA | | | | |
| | GTCACCCATCAGGGCCTGAGCTCGC | | | | |
| | CCGTCACAAAGAGCTTCAACAGGGG | | | | |
| | AGAGTGTTGA | | | | |
| 7G6- | With leader [SEQ ID NO: | With leader [SEQ ID | ATGGGCTG | GACGTCGTGATGACACAG | CGAACTGTGGCTGCACCA |
| LCzu21 | 575]: | NO: 577]: | GTCCTGCA | TCCCCCCTGTCCCTGCCT | TCTGTCTTCATCTTCCCG |
| | ATGGGCTGGTCCTGCATCATCCTGT | MGWSCIILFLVATATGVHSDVV | TCATCCTG | GTGACCCTGGGACAGCCT | CCATCTGATGAGCAGTTG |
| | TTCTGGTGGCCACCGCCACCGGCGT | MTQSPLSLPVTLGQPASISCRS | TTTCTGGT | GCCTCCATCTCCTGCAGA | AAATCTGGAACTGCCTCT |
| | GCACAGCGACGTCGTGATGACACAG | SQSILHSNGNTYLEWFQQRPGQ | GGCCACCG | TCCTCCCAGTCCATCCTG | GTTGTGTGCCTGCTGAAT |
| | TCCCCCCTGTCCCTGCCTGTGACCC | SPRLLISKVSNRFSGVPDRFSG | CCACCGGC | CACTCCAACGGCAACACC | AACTTCTATCCCAGAGAG |
| | TGGGACAGCCTGCCTCCATCTCCTG | SGSGTDFTLKISRVEAEDVGVY | GTGCACAG | TACCTGGAATGGTTCCAG | GCCAAAGTACAGTGGAAG |
| | CAGATCCTCCCAGTCCATCCTGCAC | YCFQGSHVPFTFGQGTKLEIKR | C | CAGCGGCCTGGCCAGTCC | GTGGATAACGCCCTCCAA |
| | TCCAACGGCAACACCTACCTGGAAT | TVAAPSVFIFPPSDEQLKSGTA | (nucleo- | CCCAGACTGCTGATCTCC | TCGGGTAACTCCCAGGAG |
| | GGTTCCAGCAGCGGCCTGGCCAGTC | SVVCLLNNFYPREAKVQWKVDN | tides 1 | AAGGTGTCCAACCGGTTC | AGTGTCACAGAGCAGGAC |
| | CCCCAGACTGCTGATCTCCAAGGTG | ALQSGNSQESVTEQDSKDSTYS | to 57 of | TCCGGCGTGCCCGACAGA | AGCAAGGACAGCACCTAC |
| | TCCAACCGGTTCTCCGGCGTGCCCG | LSSTLTLSKADYEKHKVYACEV | SEQ ID | TTCTCCGGCTCTGGCTCT | AGCCTCAGCAGCACCCTG |
| | ACAGATTCTCCGGCTCTGGCTCTGG | THQGLSSPVTKSFNRGEC | NO: 575) | GGCACCGACTTCACCCTG | ACGCTGAGCAAAGCAGAC |
| | CACCGACTTCACCCTGAAGATCTCC | Without leader [SEQ ID | [SEQ ID | AAGATCTCCCGGGTGGAA | TACGAGAAACACAAAGTC |
| | CGGGTGGAAGCCGAGGACGTGGGCG | NO: 578]: | NO: 579] | GCCGAGGACGTGGGCGTG | TACGCCTGCGAAGTCACC |
| | TGTACTACTGTTTTCAAGGCTCCCA | DVVMTQSPLSLPVTLGQPASIS | | TACTACTGTTTTCAAGGC | CATCAGGGCCTGAGCTCG |
| | CGTGCCCTTCACCTTCGGCCAGGGC | CRSSQSILHSNGNTYLEWFQQR | | TCCCACGTGCCCTTCACC | CCCGTCACAAAGAGCTTC |
| | ACCAAGCTGGAAATCAAACGAACTG | PGQSPRLLISKVSNRFSGVPDR | | TTCGGCCAGGGCACCAAG | AACAGGGGAGAGTGT |
| | TGGCTGCACCATCTGTCTTCATCTT | FSGSGSGTDFTLKISRVEAEDV | | CTGGAAATCAAA | (nucleotides 394 |
| | CCCGCCATCTGATGAGCAGTTGAAA | GVYYCFQGSHVPFTFGQGTKLE | | (nucleotides 58 to | to 714 of SEQ ID |
| | TCTGGAACTGCCTCTGTTGTGTGCC | IKRTVAAPSVFIFPPSDEQLKS | | 393 of SEQ ID NO: | NO: 575) |
| | TGCTGAATAACTTCTATCCCAGAGA | GTASVVCLLNNFYPREAKVQWK | | 575) | [SEQ ID NO: 582] |
| | GGCCAAAGTACAGTGGAAGGTGGAT | VDNALQSGNSQESVTEQDSKDS | | [SEQ ID NO: 580] | RTVAAPSVFIFPPSDEQL |
| | AACGCCCTCCAATCGGGTAACTCCC | TYSLSSTLTLSKADYEKHKVYA | | DVVMTQSPLSLPVTLGQP | KSGTASVVCLLNNFYPRE |
| | AGGAGAGTGTCACAGAGCAGGACAG | CEVTHQGLSSPVTKSFNRGEC | | ASISCRSSQSILHSNGNT | AKVQWKVDNALQSGNSQE |
| | CAAGGACAGCACCTACAGCCTCAGC | | | YLEWFQQRPGQSPRLLIS | SVTEQDSKDSTYSLSSTL |
| | AGCACCCTGACGCTGAGCAAAGCAG | | | KVSNRFSGVPDRFSGSGS | TLSKADYEKHKVYACEVT |
| | ACTACGAGAAACACAAAGTCTACGC | | | GTDFTLKISRVEAEDVGV | HQGLSSPVTKSFNRGEC |
| | CTGCGAAGTCACCCATCAGGGCCTG | | | YYCFQGSHVPFTFGQGTK | [SEQ ID NO: 583] |
| | AGCTCGCCCGTCACAAAGAGCTTCA | | | LEIK | |
| | ACAGGGGAGAGTGTTGA | | | [SEQ ID NO: 581] | |
| | Without leader [SEQ ID | | | | |
| | NO: 576]: | | | | |
| | GACGTCGTGATGACACAGTCCCCCC | | | | |
| | TGTCCCTGCCTGTGACCCTGGGACA | | | | |
| | GCCTGCCTCCATCTCCTGCAGATCC | | | | |
| | TCCCAGTCCATCCTGCACTCCAACG | | | | |
| | GCAACACCTACCTGGAATGGTTCCA | | | | |
| | GCAGCGGCCTGGCCAGTCCCCCAGA | | | | |
| | CTGCTGATCTCCAAGGTGTCCAACC | | | | |
| | GGTTCTCCGGCGTGCCCGACAGATT | | | | |
| | CTCCGGCTCTGGCTCTGGCACCGAC | | | | |
| | TTCACCCTGAAGATCTCCCGGGTGG | | | | |
| | AAGCCGAGGACGTGGGCGTGTACTA | | | | |
| | CTGTTTTCAAGGCTCCCACGTGCCC | | | | |
| | TTCACCTTCGGCCAGGGCACCAAGC | | | | |
| | TGGAAATCAAACGAACTGTGGCTGC | | | | |
| | ACCATCTGTCTTCATCTTCCCGCCA | | | | |
| | TCTGATGAGCAGTTGAAATCTGGAA | | | | |
| | CTGCCTCTGTTGTGTGCCTGCTGAA | | | | |
| | TAACTTCTATCCCAGAGAGGCCAAA | | | | |
| | GTACAGTGGAAGGTGGATAACGCCC | | | | |
| | TCCAATCGGGTAACTCCCAGGAGAG | | | | |
| | TGTCACAGAGCAGGACAGCAAGGAC | | | | |
| | AGCACCTACAGCCTCAGCAGCACCC | | | | |
| | TGACGCTGAGCAAAGCAGACTACGA | | | | |
| | GAAACACAAAGTCTACGCCTGCGAA | | | | |
| | GTCACCCATCAGGGCCTGAGCTCGC | | | | |
| | CCGTCACAAAGAGCTTCAACAGGGG | | | | |
| | AGAGTGTTGA | | | | |
| 7G6- | With leader [SEQ ID NO: | With leader [SEQ ID | ATGGGCTG | GACGTCGTGATGACACAG | CGAACTGTGGCTGCACCA |
| LCzu22 | 584]: | NO: 586]: | GTCCTGCA | TCCCCCCTGTCCCTGCCT | TCTGTCTTCATCTTCCCG |
| | ATGGGCTGGTCCTGCATCATCCTGT | MGWSCIILFLVATATGVHSDVV | TCATCCTG | GTGACCCTGGGACAGCCT | CCATCTGATGAGCAGTTG |
| | TTCTGGTGGCCACCGCCACCGGCGT | MTQSPLSLPVTLGQPASISCRS | TTTCTGGT | GCCTCCATCTCCTGCAGA | AAATCTGGAACTGCCTCT |
| | GCACAGCGACGTCGTGATGACACAG | SQSILHSNGNTYLEWYQQRPGQ | GGCCACCG | TCCTCCCAGTCCATCCTG | GTTGTGTGCCTGCTGAAT |
| | TCCCCCCTGTCCCTGCCTGTGACCC | SPRRLISKVSNRFSGVPDRFSG | CCACCGGC | CACTCCAACGGCAACACC | AACTTCTATCCCAGAGAG |
| | TGGGACAGCCTGCCTCCATCTCCTG | SGSGTDFTLKISRVEAEDVGVY | GTGCACAG | TACCTGGAATGGTATCAG | GCCAAAGTACAGTGGAAG |
| | CAGATCCTCCCAGTCCATCCTGCAC | YCFQGSHVPFTFGQGTKLEIKR | C | CAGCGGCCTGGCCAGTCC | GTGGATAACGCCCTCCAA |
| | TCCAACGGCAACACCTACCTGGAAT | TVAAPSVFIFPPSDEQLKSGTA | (nucleo- | CCCAGACGGCTGATCTCC | TCGGGTAACTCCCAGGAG |
| | GGTATCAGCAGCGGCCTGGCCAGTC | SVVCLLNNFYPREAKVQWKVDN | tides | AAGGTGTCCAACCGGTTC | AGTGTCACAGAGCAGGAC |
| | CCCCAGACGGCTGATCTCCAAGGTG | ALQSGNSQESVTEQDSKDSTYS | to 57 of | TCTGGCGTGCCCGACAGA | AGCAAGGACAGCACCTAC |
| | TCCAACCGGTTCTCTGGCGTGCCCG | LSSTLTLSKADYEKHKVYACEV | SEQ ID | TTCTCCGGCTCTGGCTCT | AGCCTCAGCAGCACCCTG |
| | ACAGATTCTCCGGCTCTGGCTCTGG | THQGLSSPVTKSFNRGEC | NO: 584) | GGCACCGACTTCACCCTG | ACGCTGAGCAAAGCAGAC |
| | CACCGACTTCACCCTGAAGATCTCC | Without leader [SEQ ID | [SEQ ID | AAGATCTCCCGGGTGGAA | TACGAGAAACACAAAGTC |
| | CGGGTGGAAGCCGAGGACGTGGGCG | NO: 587]: | NO: 588] | GCCGAGGACGTGGGCGTG | TACGCCTGCGAAGTCACC |
| | TGTACTACTGTTTTCAAGGCTCCCA | DVVMTQSPLSLPVTLGQPASIS | | TACTACTGTTTTCAAGGC | CATCAGGGCCTGAGCTCG |
| | CGTGCCCTTCACCTTCGGCCAGGGC | CRSSQSILHSNGNTYLEWYQQR | | TCCCACGTGCCCTTCACC | CCCGTCACAAAGAGCTTC |
| | ACCAAGCTGGAAATCAAACGAACTG | PGQSPRRLISKVSNRFSGVPDR | | TTCGGCCAGGGCACCAAG | AACAGGGGAGAGTGT |
| | TGGCTGCACCATCTGTCTTCATCTT | FSGSGSGTDFTLKISRVEAEDV | | CTGGAAATCAAA | (nucleotides 394 |
| | CCCGCCATCTGATGAGCAGTTGAAA | GVYYCFQGSHVPFTFGQGTKLE | | (nucleotides 58 to | to 714 of SEQ ID |
| | TCTGGAACTGCCTCTGTTGTGTGCC | IKRTVAAPSVFIFPPSDEQLKS | | 393 of SEQ ID NO: | NO: 584) |
| | TGCTGAATAACTTCTATCCCAGAGA | GTASVVCLLNNFYPREAKVQWK | | 584) | [SEQ ID NO: 591] |
| | GGCCAAAGTACAGTGGAAGGTGGAT | VDNALQSGNSQESVTEQDSKDS | | [SEQ ID NO: 589] | RTVAAPSVFIFPPSDEQL |
| | AACGCCCTCCAATCGGGTAACTCCC | TYSLSSTLTLSKADYEKHKVYA | | DVVMTQSPLSLPVTLGQP | KSGTASVVCLLNNFYPRE |
| | AGGAGAGTGTCACAGAGCAGGACAG | CEVTHQGLSSPVTKSFNRGEC | | ASISCRSSQSILHSNGNT | AKVQWKVDNALQSGNSQE |
| | CAAGGACAGCACCTACAGCCTCAGC | | | YLEWYQQRPGQSPRRLIS | SVTEQDSKDSTYSLSSTL |
| | AGCACCCTGACGCTGAGCAAAGCAG | | | KVSNRFSGVPDRFSGSGS | TLSKADYEKHKVYACEVT |
| | ACTACGAGAAACACAAAGTCTACGC | | | GTDFTLKISRVEAEDVGV | HQGLSSPVTKSFNRGEC |
| | CTGCGAAGTCACCCATCAGGGCCTG | | | YYCFQGSHVPFTFGQGTK | [SEQ ID NO: 592] |
| | AGCTCGCCCGTCACAAAGAGCTTCA | | | LEIK | |
| | ACAGGGGAGAGTGTTGA | | | [SEQ ID NO: 590] | |
| | Without leader [SEQ ID | | | | |
| | NO: 585]: | | | | |
| | GACGTCGTGATGACACAGTCCCCCC | | | | |
| | TGTCCCTGCCTGTGACCCTGGGACA | | | | |
| | GCCTGCCTCCATCTCCTGCAGATCC | | | | |
| | TCCCAGTCCATCCTGCACTCCAACG | | | | |
| | GCAACACCTACCTGGAATGGTATCA | | | | |
| | GCAGCGGCCTGGCCAGTCCCCCAGA | | | | |
| | CGGCTGATCTCCAAGGTGTCCAACC | | | | |
| | GGTTCTCTGGCGTGCCCGACAGATT | | | | |
| | CTCCGGCTCTGGCTCTGGCACCGAC | | | | |
| | TTCACCCTGAAGATCTCCCGGGTGG | | | | |
| | AAGCCGAGGACGTGGGCGTGTACTA | | | | |
| | CTGTTTTCAAGGCTCCCACGTGCCC | | | | |
| | TTCACCTTCGGCCAGGGCACCAAGC | | | | |
| | TGGAAATCAAACGAACTGTGGCTGC | | | | |
| | ACCATCTGTCTTCATCTTCCCGCCA | | | | |
| | TCTGATGAGCAGTTGAAATCTGGAA | | | | |
| | CTGCCTCTGTTGTGTGCCTGCTGAA | | | | |
| | TAACTTCTATCCCAGAGAGGCCAAA | | | | |
| | GTACAGTGGAAGGTGGATAACGCCC | | | | |
| | TCCAATCGGGTAACTCCCAGGAGAG | | | | |
| | TGTCACAGAGCAGGACAGCAAGGAC | | | | |
| | AGCACCTACAGCCTCAGCAGCACCC | | | | |
| | TGACGCTGAGCAAAGCAGACTACGA | | | | |
| | GAAACACAAAGTCTACGCCTGCGAA | | | | |
| | GTCACCCATCAGGGCCTGAGCTCGC | | | | |
| | CCGTCACAAAGAGCTTCAACAGGGG | | | | |
| | AGAGTGTTGA | | | | |

7G6 VH numbered according to Kabat

| Clone | | | | | | |
|---|---|---|---|---|---|---|
| Name | | | | | | |
| (Species | | VH CDR1 | | | | VH CDR3 |
| & | VH CDR1 | Acid Amino | VH CDR2 | VH CDR2 | VH CDR3 | Amino Acid |
| Isotype) | DNA Sequence | Sequence | DNA Sequence | Amino Acid | DNA Sequence | Sequence |
| mouse | ACCTACTGGATA | TYWIT | GATATTTATCCTGGTAGTAGTA | DIYPGSSICNYNEK | GAGGATGGTTACGACGCCTGGTTT | EDGYDAWF |
| 7G6-Vh | ACC | [SEQ | TTTGTAACTACAATGAGAAGTT | FKS | | AY |
| | [SEQ ID NO: | ID NO: | CAAGAGC | [SEQ ID NO: | GCTTAC | [SEQ ID |
| | 593] | 594] | [SEQ ID NO: 595] | 596] | [SEQ ID NO: 597] | NO: 598] |
| 7G6- | ACCTACTGGATC | TYWIT | GACATCTACCCCGGCTCCTCCA | DIYPGSSICNYNEK | GAGGACGGCTACGACGCTTGGTTT | EDGYDAWF |
| HCzu1 | ACC | [SEQ | TCTGCAACTACAACGAGAAGTT | FKS | GCCTAC | AY |
| | [SEQ ID NO: | ID NO: | CAAGTCC | [SEQ ID NO: | [SEQ ID NO: 603] | [SEQ ID |
| | 599] | 600] | [SEQ ID NO: 601] | 602] | | NO: 604] |
| 7G6- | ACCTACTGGATC | TYWIT | GACATCTACCCCGGCTCCTCCA | DIYPGSSICNYNEK | GAGGACGGCTACGACGCTTGGTTT | EDGYDAWF |
| HCzu2 | ACC | [SEQ | TCTGCAACTACAACGAGAAGTT | FKS | GCCTAC | AY |
| | [SEQ ID NO: | ID NO: | CAAGTCC | [SEQ ID NO: | [SEQ ID NO: 609] | [SEQ ID |
| | 605] | 606] | [SEQ ID NO: 607] | 608] | | NO: 610] |
| 7G6- | ACCTACTGGATC | TYWIT | GACATCTACCCCGGCTCCTCCA | DIYPGSSICNYNEK | GAGGACGGCTACGACGCTTGGTTT | EDGYDAWF |
| HCzu3 | ACC | [SEQ | TCTGCAACTACAACGAGAAGTT | FKS | GCCTAC | AY |
| | [SEQ ID NO: | ID NO: | CAAGTCC | [SEQ ID NO: | [SEQ ID NO: 615] | [SEQ ID |
| | 611] | 612] | [SEQ ID NO: 613] | 614] | | NO: 616] |
| 7G6- | ACCTACTGGATC | TYWIT | GACATCTACCCCGGCTCCTCCA | DIYPGSSICNYAQK | GAGGACGGCTACGACGCTTGGTTT | EDGYDAWF |
| HCzu4 | ACC | [SEQ | TCTGCAACTACGCCCAGAAATT | FQG | GCCTAC | AY |
| | [SEQ ID NO: | ID NO: | CCAGGGC | [SEQ ID NO: | [SEQ ID NO: 621] | [SEQ ID |
| | 617] | 618] | [SEQ ID NO: 619] | 620] | | NO: 622] |
| 7G6- | ACCTACTGGATC | TYWIT | GACATCTACCCCGGCTCCTCCA | DIYPGSSISNYNEK | GAGGACGGCTACGACGCTTGGTTT | EDGYDAWF |
| HCzu5 | ACC | [SEQ | TCTCCAACTACAACGAGAAGTT | FKS | | AY |
| | [SEQ ID NO: | ID NO: | CAAGTCC | [SEQ ID NO: | GCCTAC | [SEQ ID |
| | 623] | 624] | [SEQ ID NO: 625] | 626] | [SEQ ID NO: 627] | NO: 628] |
| 7G6- | ACCTACTGGATC | TYWIT | GACATCTACCCCGGCTCCTCCA | DIYPGSSISNYNEK | GAGGACGGCTACGACGCTTGGTTT | EDGYDAWF |
| HCzu6 | ACC | [SEQ | TCTCCAACTACAACGAGAAGTT | FKS | GCCTAC | AY |
| | [SEQ ID NO: | ID NO: | CAAGTCC | [SEQ ID NO: | [SEQ ID NO: 633] | [SEQ ID |
| | 629] | 630] | [SEQ ID NO: 631] | 632] | | NO: 634] |
| 7G6- | ACCTACTGGATC | TYWIT | GACATCTACCCCGGCTCCTCCA | DIYPGSSISNYAQK | GAGGACGGCTACGACGCTTGGTTT | EDGYDAWF |
| HCzu7 | ACC | [SEQ | TCTCCAACTACGCCCAGAAGTT | FQG | GCCTAC | AY |
| | [SEQ ID NO: | ID NO: | CCAGGGC | [SEQ ID NO: | [SEQ ID NO: 639] | [SEQ ID |
| | 635] | 636] | [SEQ ID NO: 637] | 638] | | NO: 640] |
| 7G6- | ACCTACTGGATC | TYWIT | GACATCTACCCCGGCTCCTCCA | DIYPGSSISNYAQK | GAGGACGGCTACGACGCTTGGTTT | EDGYDAWF |
| HCzu8 | ACC | [SEQ | TCTCCAACTACGCCCAGAAGTT | FQG | | AY |
| | [SEQ ID NO: | ID NO: | CCAGGGC | [SEQ ID NO: | GCCTAC | [SEQ ID |
| | 641] | 642] | [SEQ ID NO: 643] | 644] | [SEQ ID NO: 645] | NO: 646] |
| 7G6- | ACCTACTGGATC | TYWIT | GACATCTACCCCGGCTCCTCCA | DIYPGSSICNYAQK | GAGGACGGCTACGACGCTTGGTTT | EDGYDAWF |
| HCzu9 | ACC | [SEQ | TCTGCAACTACGCCCAGAAGTT | FQG | GCCTAC | AY |
| | [SEQ ID NO: | ID NO: | CCAGGGC | [SEQ ID NO: | [SEQ ID NO: 651] | [SEQ ID |
| | 647] | 648] | [SEQ ID NO: 649] | 650] | | NO: 652] |
| 7G6- | ACCTACTGGATC | TYWIT | GACATCTACCCCGGCTCCTCCA | DIYPGSSICNYAQK | GAGGACGGCTACGACGCTTGGTTT | EDGYDAWF |
| HCzu10 | ACC | [SEQ | TCTGCAACTACGCCCAGAAGTT | FQG | GCCTAC | AY |
| | [SEQ ID NO: | ID NO: | CCAGGGC | [SEQ ID NO: | [SEQ ID NO: 657] | [SEQ ID |
| | 653] | 654] | [SEQ ID NO: 655] | 656] | | NO: 658] |
| 7G6- | ACCTACTGGATC | TYWIT | GACATCTACCCCGGCTCCTCCA | DIYPGSSICNYNEK | GAGGACGGCTACGACGCTTGGTTT | EDGYDAWF |
| HCzu11 | ACC | [SEQ | TCTGCAACTACAACGAGAAGTT | FKS | | AY |
| | [SEQ ID NO: | ID NO: | CAAGTCC | [SEQ ID NO: | GCCTAC | [SEQ ID |
| | 659] | 660] | [SEQ ID NO: 661] | 662] | [SEQ ID NO: 663] | NO: 664] |
| 7G6- | ACCTACTGGATC | TYWIT | GACATCTACCCCGGCTCCTCCA | DIYPGSSICNYNEK | GAGGACGGCTACGACGCTTGGTTT | EDGYDAWF |
| HCzu12 | ACC | [SEQ | TCTGCAACTACAACGAGAAGTT | FKS | GCTTAC | AY |
| | [SEQ ID NO: | ID NO: | CAAGTCC | [SEQ ID NO: | [SEQ ID NO: 669] | [SEQ ID |
| | 665] | 666] | [SEQ ID NO: 667] | 668] | | NO: 670] |
| 7G6- | ACCTACTGGATC | TYWIT | GACATCTACCCCGGCTCCTCCA | DIYPGSSICNYADS | GAGGACGGCTACGACGCTTGGTTT | EDGYDAWF |
| HCzu13 | ACC | [SEQ | TCTGCAACTACGCCGACTCCGT | VKG | GCTTAC | AY |
| | [SEQ ID NO: | ID NO: | CAAGGGC | [SEQ ID NO: | [SEQ ID NO: 675] | [SEQ ID |
| | 671] | 672] | [SEQ ID NO: 673] | 674] | | NO: 676] |
| 7G6- | ACCTACTGGATC | TYWIT | GACATCTACCCCGGCTCCTCCA | DIYPGSSICNYADK | GAGGACGGCTACGACGCTTGGTTT | EDGYDAWF |
| HCzu14 | ACC | [SEQ | TCTGCAACTACGCCGACAAGTT | FKG | | AY |
| | [SEQ ID NO: | ID NO: | CAAGGGC | [SEQ ID NO: | GCTTAC | [SEQ ID |
| | 677] | 678] | [SEQ ID NO: 679] | 680] | [SEQ ID NO: 681] | NO: 682] |
| 7G6- | ACCTACTGGATC | TYWIT | GACATCTACCCCGGCTCCTCCA | DIYPGSSICNYNEK | GAGGACGGCTACGACGCTTGGTTT | EDGYDAWF |
| HCzu15 | ACC | [SEQ | TCTGCAACTACAACGAGAAGTT | FKS | GCTTAC | AY |
| | [SEQ ID NO: | ID NO: | CAAGTCC | [SEQ ID NO: | [SEQ ID NO: 687] | [SEQ ID |
| | 683] | 684] | [SEQ ID NO: 685] | 686] | | NO: 688] |
| 7G6- | ACCTACTGGATC | TYWIT | GACATCTACCCCGGCTCCTCCA | DIYPGSSICNYNEK | GAGGACGGCTACGACGCTTGGTTT | EDGYDAWF |
| HCzu16 | ACC | [SEQ | TCTGCAACTACAACGAGAAGTT | FKS | | AY |
| | [SEQ ID NO: | ID NO: | CAAGTCC | [SEQ ID NO: | GCTTAC | [SEQ ID |
| | 689] | 690] | [SEQ ID NO: 691] | 692] | [SEQ ID NO: 693] | NO: 694] |
| 7G6- | ACCTACTGGATC | TYWIT | GACATCTACCCCGGCTCCTCCA | DIYPGSSICNYNEK | GAGGACGGCTACGACGCTTGGTTT | EDGYDAWF |
| HCzu17 | ACC | [SEQ | TCTGCAACTACAACGAGAAGTT | FKS | GCTTAC | AY |
| | [SEQ ID NO: | ID NO: | CAAGTCC | [SEQ ID NO: | [SEQ ID NO: 699] | [SEQ ID |
| | 695] | 696] | [SEQ ID NO: 697] | 698] | | NO: 700] |
| 7G6- | ACCTACTGGATC | TYWIT | GACATCTACCCCGGCTCCTCCA | DIYPGSSICNYNEK | GAGGACGGCTACGACGCTTGGTTT | EDGYDAWF |
| HCzu18 | ACC | [SEQ | TCTGCAACTACAACGAGAAGTT | FKS | GCTTAC | AY |
| | [SEQ ID NO: | ID NO: | CAAGTCC | [SEQ ID NO: | [SEQ ID NO: 705] | [SEQ ID |
| | 701] | 702] | [SEQ ID NO: 703] | 704] | | NO: 706] |
| 7G6- | ACCTACTGGATC | TYWIT | GACATCTACCCCGGCTCCTCCA | DIYPGSSICNYADK | GAGGACGGCTACGACGCTTGGTTT | EDGYDAWF |
| HCzu19 | ACC | [SEQ | TCTGCAACTACGCCGACAAGTT | FKG | GCTTAC | AY |
| | [SEQ ID NO: | ID NO: | CAAGGGC | [SEQ ID NO: | [SEQ ID NO: 711] | [SEQ ID |
| | 7071 | 708] | [SEQ ID NO: 709] | 710] | | NO: 712] |
| 7G6- | ACCTACTGGATC | TYWIT | GACATCTACCCCGGCTCCTCCA | DIYPGSSICNYADK | GAGGACGGCTACGACGCTTGGTTT | EDGYDAWF |
| HCzu20 | ACC | [SEQ | TCTGCAACTACGCCGACAAGTT | FKG | GCTTAC | AY |
| | [SEQ ID NO: | ID NO: | CAAGGGC | [SEQ ID NO: | [SEQ ID NO: 717] | [SEQ ID |
| | 713] | 714] | [SEQ ID NO: 715] | 716] | | NO: 718] |
| 7G6- | ACCTACTGGATC | TYWIT | GACATCTACCCCGGCTCCTCCA | DIYPGSSISNYADS | GAGGACGGCTACGACGCTTGGTTT | EDGYDAWF |
| HCzu23 | ACC | [SEQ | TCTCCAACTACGCCGACTCCGT | VKG | GCCTAC | AY |
| | [SEQ ID NO: | ID NO: | CAAGGGC | [SEQ ID NO: | [SEQ ID NO: 723] | [SEQ ID |
| | 719] | 720] | [SEQ ID NO: 721] | 722] | | NO: 724] |
| 7G6- | ACCTACTGGATC | TYWIT | GACATCTACCCCGGCTCCTCCA | DIYPGSSISNYNEK | GAGGACGGCTACGACGCTTGGTTT | EDGYDAWF |
| HCzu24 | ACC | [SEQ | TCTCCAACTACAACGAGAAGTT | FKS | GCCTAC | AY |
| | [SEQ ID NO: | ID NO: | CAAGTCC | [SEQ ID NO: | [SEQ ID NO: 729] | [SEQ ID |
| | 725] | 726] | [SEQ ID NO: 727 | 728] | | NO: 730] |
| 7G6- | ACCTACTGGATC | TYWIT | GACATCTACCCCGGCTCCTCCA | DIYPGSSISNYNEK | GAGGACGGCTACGACGCTTGGTTT | EDGYDAWF |
| HCzu25 | ACC | SEQ | TCTCCAACTACAACGAGAAGTT | FKS | GCTTAC | AY |
| | [SEQ ID NO: | ID NO: | CAAGTCC | [SEQ ID | [SEQ ID NO: 735] | [SEQ ID |
| | 731] | 732] | [SEQ ID NO: 733] | NO: 734] | | NO: 736] |

7G6 VL numbered according to Kabat

| Clone | | | | | | |
|---|---|---|---|---|---|---|
| Name | | | | | | |
| (Species | | VL CDR1 | | VL CDR2 | | VL CDR3 |
| & | VL CDR1 | Amino Acid | VL CDR2 | Amino Acid | VL CDR3 | Amino Acid |
| Isotype) | DNA Sequence | Sequence | DNA Sequence | Sequence | DNA Sequence | Sequence |
| mouse | AGATCTAGTCAGAGCATTTTA | RSSQSILHSNGNT | AAAGTTTCCAACCG | KVSNRFS | TTTCAAGGTTCACATGTTCCAT | FQGSHVP |
| 7G6-V_{K} | CATAGTAATGGAAACACCTAT | YLE | ATTTTCT | [SEQ ID | TCACG | FT |
| | TTAGAA | [SEQ ID NO: | [SEQ ID NO: | NO: | [SEQ ID NO: 741] | [SEQ ID |
| | [SEQ ID NO: 737] | 738] | 739] | 740] | | NO: |
| | | | | | | 742] |
| 7G6- | AGATCCTCCCAGTCCATCCTG | RSSQSILHSNGNT | AAGGTGTCCAACCG | KVSNRFS | TTTCAAGGCTCCCACGTGCCCT | FQGSHVP |
| LCzu1 | CACTCCAACGGCAACACCTAC | YLE | GTTCTCC | [SEQ ID | TCACC | FT |
| | CTGGAA [SEQ ID NO: | [SEQ ID NO: | [SEQ ID NO: | NO: | [SEQ ID NO: 747] | [SEQ ID |
| | 743] | 744] | 745] | 746] | | NO: |
| | | | | | | 748] |
| 7G6- | AGATCCTCCCAGTCCATCCTG | RSSQSILHSNGNT | AAGGTGTCCAACCG | KVSNRFS | TTTCAAGGCTCCCACGTGCCCT | FQGSHVP |
| LCzu2 | CACTCCAACGGCAACACCTAC | YLE | GTTCTCC | [SEQ ID | TCACC | FT |
| | CTGGAA | [SEQ ID NO: | [SEQ ID NO: | NO: | [SEQ ID NO: 753] | [SEQ ID |
| | [SEQ ID NO: 749] | 750] | 751] | 752] | | NO: |
| | | | | | | 754] |
| 7G6- | AGATCCTCCCAGTCCATCCTG | RSSQSILHSNGNT | AAGGTGTCCAACCG | KVSNRFS | TTTCAAGGCTCCCACGTGCCCT | FQGSHVP |
| LCzu3 | CACTCCAACGGCAACACCTAC | YLE | GTTCTCC | [SEQ ID | TCACC | FT |
| | CTGGAA | [SEQ ID NO: | [SEQ ID NO: | NO: | [SEQ ID NO: 759] | [SEQ ID |
| | [SEQ ID NO: 755] | 756] | 757] | 758] | | NO: |
| | | | | | | 760] |
| 7G6- | AGATCCTCCCAGTCCATCCTG | RSSQSILHSNGNT | AAGGTGTCCAACCG | KVSNRFS | TTTCAAGGCTCCCACGTGCCCT | FQGSHVP |
| LCzu4 | CACTCCAACGGCAACACCTAC | YLE | GTTCTCT | [SEQ ID | TCACC | FT |
| | CTGGAA | [SEQ ID NO: | [SEQ ID NO: | NO: | [SEQ ID NO: 765] | [SEQ ID |
| | [SEQ ID NO: 761] | 762] | 763] | 764] | | NO: |
| | | | | | | 766] |
| 7G6- | AGATCCTCCCAGTCCATCCTG | RSSQSILHSNGNT | AAGGTGTCCAACCG | KVSNRFS | TTTCAAGGCTCCCACGTGCCCT | FQGSHVP |
| LCzu5 | CACTCCAACGGCAACACCTAC | YLE | GTTCTCC | [SEQ ID | TCACC | FT |
| | CTGGAA | [SEQ ID NO: | [SEQ ID NO: | NO: | [SEQ ID NO: 771] | [SEQ ID |
| | [SEQ ID NO: 767] | 768] | 769] | 770] | | NO: |
| | | | | | | 772] |
| 7G6- | AGATCCTCCCAGTCCATCCTG | RSSQSILHSNGNT | AAGGTGTCCAACCG | KVSNRFS | TTTCAAGGCTCCCACGTGCCCT | FQGSHVP |
| LCzu6 | CACTCCAACGGCAACACCTAC | YLE | GTTCTCC | [SEQ ID | TCACC | FT |
| | CTGGAA | [SEQ ID NO: | [SEQ ID NO: | NO: | [SEQ ID NO: 777] | [SEQ ID |
| | [SEQ ID NO: 773] | 774] | 775] | 776] | | NO: |
| | | | | | | 778] |
| 7G6- | AGATCCTCCCAGTCCATCCTG | RSSQSILHSNGNT | AAGGTGTCCAACCG | KVSNRFS | TTTCAAGGCTCCCACGTGCCCT | FQGSHVP |
| LCzu7 | CACTCCAACGGCAACACCTAC | YLE | GTTCTCC | [SEQ ID | TCACC | FT |
| | CTGGAA | [SEQ ID NO: | [SEQ ID NO: | NO: | [SEQ ID NO: 783] | [SEQ ID |
| | [SEQ ID NO: 779] | 780] | 781] | 782] | | NO: |
| | | | | | | 784] |
| 7G6- | AGATCCTCCCAGTCCATCGTG | RSSQSIVHSNGNT | AAGGTGTCCAACCG | KVSNRFS | TTTCAAGGCTCCCACGTGCCCT | FQGSHVP |
| LCzu8 | CACTCCAACGGCAACACCTAC | YLE | GTTCTCC | [SEQ ID | TCACC | FT |
| | CTGGAA | [SEQ ID NO: | [SEQ ID NO: | NO: | [SEQ ID NO: 789] | [SEQ ID |
| | [SEQ ID NO: 785] | 786] | 787] | 788] | | NO: |
| | | | | | | 790] |
| 7G6- | AGATCCTCCCAGTCCATCGTG | RSSQSIVHSNGNT | AAGGTGTCCAACCG | KVSNRFS | TTTCAAGGCTCCCACGTGCCCT | FQGSHVP |
| LCzu9 | CACTCCAACGGCAACACCTAC | YLN | GTTCTCC | [SEQ ID | TCACC | FT |
| | CTGAAC | [SEQ ID NO: | [SEQ ID NO: | NO: | [SEQ ID NO: 795] | [SEQ ID |
| | [SEQ ID NO: 791] | 792] | 793] | 794 | | NO: |
| | | | | | | 796] |
| 7G6- | AGATCCTCCCAGTCCATCGTG | RSSQSIVHSNGNT | AAGGTGTCCAACCG | KVSNRFS | TTTCAAGGCTCCCACGTGCCCT | FQGSHVP |
| LCzu10 | CACTCCAACGGCAACACCTAC | YLE | GTTCTCC | [SEQ ID | TCACC | FT |
| | CTGGAA | [SEQ ID NO: | [SEQ ID NO: | NO: 800] | [SEQ ID NO: 801] | [SEQ ID |
| | [SEQ ID NO: 797] | 798] | 799] | | | NO: |
| | | | | | | 802] |
| 7G6- | CGGTCCTCCCAGTCCATCCTG | RSSQSILHSNGNT | AAGGTGTCCAACCG | KVSNRFS | TTTCAAGGCTCCCACGTGCCCT | FQGSHVP |
| LCzu11 | CACTCCAACGGCAACACCTAC | YLE | GTTCTCC | [SEQ ID | TCACC | FT |
| | CTGGAA | [SEQ ID NO: | [SEQ ID NO: | NO: | [SEQ ID NO: 807] | [SEQ ID |
| | [SEQ ID NO: 803] | 804] | 805] | 806] | | NO: |
| | | | | | | 808] |
| 7G6- | CGGTCCTCCCAGTCCATCCTG | RSSQSILHSNGNT | AAGGTGTCCAACCG | KVSNRFS | TTTCAAGGCTCCCACGTGCCCT | FQGSHVP |
| LCzu12 | CACTCCAACGGCAACACCTAC | YLE | GTTCTCC | [SEQ ID | TCACC | FT |
| | CTGGAA | [SEQ ID NO: | [SEQ ID NO: | NO: | [SEQ ID NO: 813] | [SEQ ID |
| | [SEQ ID NO: 809] | 810] | 811] | 812] | | NO: |
| | | | | | | 814] |
| 7G6- | CGGTCCTCCCAGTCCATCCTG | RSSQSILHSNGNT | AAGGTGTCCAACCG | KVSNRFS | TTTCAAGGCTCCCACGTGCCCT | FQGSHVP |
| LCzu13 | CACTCCAACGGCAACACCTAC | YLE | GTTCTCC | [SEQ ID | TCACC | FT |
| | CTGGAA | [SEQ ID NO: | [SEQ ID NO: | NO: | [SEQ ID NO: 819] | [SEQ ID |
| | [SEQ ID NO: 815] | 816] | 817] | 818] | | NO: |
| | | | | | | 820] |
| 7G6- | CGGTCCTCCCAGTCCATCCTG | RSSQSILHSNGNT | AAGGTGTCCAACCG | KVSNRFS | TTTCAAGGCTCCCACGTGCCCT | FQGSHVP |
| LCzu14 | CACTCCAACGGCAACACCTAC | YLE | GTTCTCC | [SEQ ID | TCACC | FT |
| | CTGGAA | [SEQ ID NO: | [SEQ ID NO: | NO: | [SEQ ID NO: 825] | [SEQ ID |
| | [SEQ ID NO: 821] | 822] | 823] | 824] | | NO: |
| | | | | | | 826] |
| 7G6- | CGGTCCTCCCAGTCCATCCTG | RSSQSILHSNGNT | AAGGTGTCCAACCG | KVSNRFS | TTTCAAGGCTCCCACGTGCCCT | FQGSHVP |
| LCzu15 | CACTCCAACGGCAACACCTAC | YLE | GTTCTCC | [SEQ ID | TCACC | FT |
| | CTGGAA | [SEQ ID NO: | [SEQ ID NO: | NO: | [SEQ ID NO: 831] | [SEQ ID |
| | [SEQ ID NO: 827] | 828] | 829] | 830] | | NO: |
| | | | | | | 832] |
| 7G6- | CGGTCCTCCCAGTCCATCGTG | RSSQSIVHSNGNT | AAGGTGTCCAACCG | KVSNRFS | TTTCAAGGCTCCCACGTGCCCT | FQGSHVP |
| LCzu16 | CACTCCAACGGCAACACCTAC | YLE | GTTCTCC | [SEQ ID | TCACC | FT |
| | CTGGAA | [SEQ ID NO: | [SEQ ID NO: | NO: | [SEQ ID NO: 837] | [SEQ ID |
| | [SEQ ID NO: 833] | 834] | 835] | 836] | | NO: |
| | | | | | | 838] |
| 7G6- | CGGTCCTCCCAGTCCATCGTG | RSSQSIVHSNGNT | AAGGTGTCCAACCG | KVSNRFS | TTTCAAGGCTCCCACGTGCCCT | FQGSHVP |
| LCzu17 | CACTCCAACGGCAACACCTAC | YLN | GTTCTCC | [SEQ ID | TCACC | FT |
| | CTGAAC | [SEQ ID NO: | [SEQ ID NO: | NO: | [SEQ ID NO: 843] | [SEQ ID |
| | [SEQ ID NO: 839] | 840] | 841] | 842] | | NO: |
| | | | | | | 844] |
| 7G6- | CGGTCCTCCCAGTCCATCCTG | RSSQSILHSNGNT | AAGGTGTCCAACCG | KVSNRFS | TTTCAAGGCTCCCACGTGCCCT | FQGSHVP |
| LCzu18 | CACTCCAACGGCAACACCTAC | YLE | GTTCTCC | [SEQ ID | TCACC | FT |
| | CTGGAA | [SEQ ID NO: | [SEQ ID NO: | NO: | [SEQ ID NO: 849] | [SEQ ID |
| | [SEQ ID NO: 845] | 846] | 847] | 848] | | NO: |
| | | | | | | 850] |
| 7G6- | AGATCCTCCCAGTCCATCCTG | RSSQSILHSNGNT | AAGGTGTCCAACCG | KVSNRFS | TTTCAAGGCTCCCACGTGCCCT | FQGSHVP |
| LCzu21 | CACTCCAACGGCAACACCTAC | YLE | GTTCTCC | [SEQ ID | TCACC | FT |
| | CTGGAA | [SEQ ID NO: | [SEQ ID NO: | NO: | [SEQ ID NO: 855] | [SEQ ID |
| | [SEQ ID NO: 851] | 852] | 853] | 854] | | NO: |
| | | | | | | 856] |
| 7G6- | AGATCCTCCCAGTCCATCCTG | RSSQSILHSNGNT | AAGGTGTCCAACCG | KVSNRFS | TTTCAAGGCTCCCACGTGCCCT | FQGSHVP |
| LCzu22 | CACTCCAACGGCAACACCTAC | YLE | GTTCTCT | [SEQ ID | TCACC | FT |
| | CTGGAA | [SEQ ID NO: | [SEQ ID NO: | NO: | [SEQ ID NO: 861] | [SEQ ID |
| | [SEQ ID NO: 857] | 858] | 859] | 860] | | NO: |
| | | | | | | 862] |

7G6 VH numbered according to IMGT

| Clone | | | | | | |
|---|---|---|---|---|---|---|
| Name | | | | | | |
| (Species | | VH CDR1 | | VH CDR2 | | VH CDR3 |
| & | VH CDR1 | Amino Acid | VH CDR2 | Amino Acid | VH CDR3 | Amino Acid |
| Isotype) | DNA Sequence | Sequence | DNA Sequence | Sequence | DNA Sequence | Sequence |
| mouse | GGCTACACCTTCA | GYTFTTY | ATTTATCCTGGTAGTAGTATTT | IYPGSSI | GCAAGGGAGGATGGTTACGACGCCTG | AREDGYDAWFAY |
| 7G6-Vh | CCACCTACTGG | W | GT | C | GTTTGCTTAC | [SEQ ID NO: |
| | [SEQ ID NO: | [SEQ ID | [SEQ ID NO: 865] | [SEQ ID | [SEQ ID NO: 867] | 868] |
| | 863] | NO: | | NO: | | |
| | | 864] | | 866] | | |
| 7G6- | GGCTACACCTTTA | GYTFTTY | ATCTACCCCGGCTCCTCCATCT | IYPGSSI | GCTAGAGAGGACGGCTACGACGCTTG | AREDGYDAWFAY |
| HCzu1 | CCACCTACTGG | W | GC | C | GTTTGCCTAC | [SEQ ID NO: |
| | [SEQ ID NO: | [SEQ ID | [SEQ ID NO: 871] | [SEQ ID | [SEQ ID NO: 873] | 874] |
| | 869] | NO: | | NO: | | |
| | | 870] | | 872] | | |
| 7G6- | GGCTACACCTTTA | GYTFTTY | ATCTACCCCGGCTCCTCCATCT | IYPGSSI | GCTAGAGAGGACGGCTACGACGCTTG | AREDGYDAWFAY |
| HCzu2 | CCACCTACTGG | W | GC | C | GTTTGCCTAC | [SEQ ID NO: |
| | [SEQ ID NO: | [SEQ ID | [SEQ ID NO: 877] | [SEQ ID | [SEQ ID NO: 879] | 880] |
| | 875] | NO: | | NO: | | |
| | | 876] | | 878] | | |
| 7G6- | GGCTACACCTTTA | GYTFTTY | ATCTACCCCGGCTCCTCCATCT | IYPGSSI | GCTAGAGAGGACGGCTACGACGCTTG | AREDGYDAWFAY |
| HCzu3 | CCACCTACTGG | W | GC | C | GTTTGCCTAC | [SEQ ID NO: |
| | [SEQ ID NO: | [SEQ ID | [SEQ ID NO: 883] | [SEQ ID | [SEQ ID NO: 885] | 886] |
| | 881] | NO: 882] | | NO: | | |
| | | | | 884] | | |
| 7G6- | GGCTACACCTTTA | GYTFTTY | ATCTACCCCGGCTCCTCCATCT | IYPGSSI | GCTAGAGAGGACGGCTACGACGCTTG | AREDGYDAWFAY |
| HCzu4 | CCACCTACTGG | W | GC | C | GTTTGCCTAC | [SEQ ID NO: |
| | [SEQ ID NO: | [SEQ ID | [SEQ ID NO: 889] | [SEQ ID | [SEQ ID NO: 891] | 892] |
| | 887] | NO: | | NO: | | |
| | | 888] | | 890] | | |
| 7G6- | GGCTACACCTTTA | GYTFTTY | ATCTACCCCGGCTCCTCCATCT | IYPGSSI | GCTAGAGAGGACGGCTACGACGCTTG | AREDGYDAWFAY |
| HCzu5 | CCACCTACTGG | W | CC | S | GTTTGCCTAC | [SEQ ID NO: |
| | [SEQ ID NO: | [SEQ ID | [SEQ ID NO: 895] | [SEQ ID | [SEQ ID NO: 897] | 898] |
| | 893] | NO: 894] | | NO: | | |
| | | | | 896] | | |
| 7G6- | GGCTACACCTTTA | GYTFTTY | ATCTACCCCGGCTCCTCCATCT | IYPGSSI | GCTAGAGAGGACGGCTACGACGCTTG | AREDGYDAWFAY |
| HCzu6 | CCACCTACTGG | W | CC | S | GTTTGCCTAC | [SEQ ID NO: |
| | [SEQ ID NO: | [SEQ ID | [SEQ ID NO: 901] | [SEQ ID | [SEQ ID NO: 903] | 904] |
| | 899] | NO: | | NO: 902] | | |
| | | 900] | | | | |
| 7G6- | GGCTACACCTTTA | GYTFTTY | ATCTACCCCGGCTCCTCCATCT | IYPGSSI | GCTAGAGAGGACGGCTACGACGCTTG | AREDGYDAWFAY |
| HCzu7 | CCACCTACTGG | W | CC | S | GTTTGCCTAC | [SEQ ID NO: |
| | [SEQ ID NO: | [SEQ ID | [SEQ ID NO: 907] | [SEQ ID | [SEQ ID NO: 909] | 910] |
| | 905] | NO: | | NO: 908] | | |
| | | 906] | | | | |
| 7G6- | GGCTACACCTTTA | GYTFTTY | ATCTACCCCGGCTCCTCCATCT | IYPGSSI | GCTAGAGAGGACGGCTACGACGCTTG | AREDGYDAWFAY |
| HCzu8 | CCACCTACTGG | W | CC | S | GTTTGCCTAC | [SEQ ID NO: |
| | [SEQ ID NO: | [SEQ ID | [SEQ ID NO: 913] | [SEQ ID | [SEQ ID NO: 915] | 916] |
| | 911] | NO: | | NO: 914] | | |
| | | 912] | | | | |
| 7G6- | GGCTACACCTTTA | GYTFTTY | ATCTACCCCGGCTCCTCCATCT | IYPGSSI | GCTAGAGAGGACGGCTACGACGCTTG | AREDGYDAWFAY |
| HCzu9 | CCACCTACTGG | W | GC | C | GTTTGCCTAC | [SEQ ID NO: |
| | [SEQ ID NO: | [SEQ ID | [SEQ ID NO: 919] | [SEQ ID | [SEQ ID NO: 921] | 922] |
| | 917] | NO: | | NO: | | |
| | | 918] | | 920] | | |
| 7G6- | GGCTACACCTTTA | GYTFTTY | ATCTACCCCGGCTCCTCCATCT | IYPGSSI | GCTAGAGAGGACGGCTACGACGCTTG | AREDGYDAWFAY |
| HCzu10 | CCACCTACTGG | W | GC | C | GTTTGCCTAC | [SEQ ID NO: |
| | [SEQ ID NO: | [SEQ ID | [SEQ ID NO: 925] | [SEQ ID | [SEQ ID NO: 927] | 928] |
| | 923] | NO: | | NO | | |
| | | 924] | | 926] | | |
| 7G6- | GGCTACACCTTCA | GYTFTTY | ATCTACCCCGGCTCCTCCATCT | IYPGSSI | GCCAAAGAGGACGGCTACGACGCTTG | AKEDGYDAWFAY |
| HCzu11 | CCACCTACTGG | W | GC | C | GTTTGCCTAC | [SEQ ID NO: |
| | [SEQ ID NO: | [SEQ ID | [SEQ ID NO: 931] | [SEQ ID | [SEQ ID NO: 933] | 934] |
| | 929] | NO: 930] | | NO: 932] | | |
| 7G6- | GGCTACACCTTCA | GYTFTTY | ATCTACCCCGGCTCCTCCATCT | IYPGSSI | GCCAGAGAGGACGGCTACGACGCTTG | AREDGYDAWFAY |
| HCzu12 | CCACCTACTGG | W | GC | C | GTTTGCTTAC | [SEQ ID NO: |
| | [SEQ ID NO: | [SEQ ID | [SEQ ID NO: 937] | [SEQ ID | [SEQ ID NO: 939] | 940] |
| | 935] | NO: 936] | | NO: 938] | | |
| 7G6- | GGCTACACCTTCA | GYTFTTY | ATCTACCCCGGCTCCTCCATCT | IYPGSSI | GCCAGAGAGGACGGCTACGACGCTTG | AREDGYDAWFAY |
| HCzu13 | CCACCTACTGG | W | GC | C | GTTTGCTTAC | [SEQ ID NO: |
| | [SEQ ID NO: | [SEQ ID | [SEQ ID NO: 943] | [SEQ ID | [SEQ ID NO: 945] | 946] |
| | 941] | NO: 942] | | NO: 944] | | |
| 7G6- | GGCTACACCTTCA | GYTFTTY | ATCTACCCCGGCTCCTCCATCT | IYPGSSI | GCCAGAGAGGACGGCTACGACGCTTG | AREDGYDAWFAY |
| HCzu14 | CCACCTACTGG | W | GC | C | GTTTGCTTAC | [SEQ ID |
| | [SEQ ID | [SEQ ID | [SEQ ID NO: 949] | [SEQ ID | [SEQ ID NO: 951] | NO: 952] |
| | NO: 947] | NO: | | NO: | | |
| | | 948] | | 950] | | |
| 7G6- | GGCTACACCTTCA | GYTFTTY | ATCTACCCCGGCTCCTCCATCT | IYPGSSI | GCCAGAGAGGACGGCTACGACGCTTG | AREDGYDAWFAY |
| HCzu15 | CCACCTACTGG | W | GC | C | GTTTGCTTAC | [SEQ ID |
| | [SEQ ID | [SEQ ID | [SEQ ID NO: 955] | [SEQ ID | [SEQ ID NO: 957] | NO: 958] |
| | NO: 953] | NO: 954] | | NO: | | |
| | | | | 956] | | |
| 7G6- | GGCTACACCTTCA | GYTFTTY | ATCTACCCCGGCTCCTCCATCT | IYPGSSI | GCCAGAGAGGACGGCTACGACGCTTG | AREDGYDAWFAY |
| HCzu16 | CCACCTACTGG | W | GC | C | GTTTGCTTAC | [SEQ ID |
| | [SEQ ID NO: | [SEQ ID | [SEQ ID NO: 961] | [SEQ ID | [SEQ ID NO: 963] | NO: 964] |
| | 959] | NO: | | NO: | | |
| | | 960] | | 962] | | |
| 7G6- | GGCTACACCTTCA | GYTFTTY | ATCTACCCCGGCTCCTCCATCT | IYPGSSI | GCCAGAGAGGACGGCTACGACGCTTG | AREDGYDAWFAY |
| HCzu17 | CCACCTACTGG | W | GC | C | GTTTGCTTAC | [SEQ ID |
| | [SEQ ID NO: | [SEQ ID | [SEQ ID NO: 967] | [SEQ ID | [SEQ ID NO: 969] | NO:970] |
| | 965] | NO: | | NO: | | |
| | | 966] | | 968] | | |
| 7G6- | GGCTACACCTTCA | GYTFTTY | ATCTACCCCGGCTCCTCCATCT | IYPGSSI | GCCAGAGAGGACGGCTACGACGCTTG | AREDGYDAWFAY |
| HCzu18 | CCACCTACTGG | W | GC | C | GTTTGCTTAC | [SEQ ID |
| | [SEQ ID NO: | [SEQ ID | [SEQ ID NO: 973] | [SEQ ID | [SEQ ID NO: 975] | NO: 976] |
| | 971] | NO: | | NO: | | |
| | | 972] | | 974] | | |
| 7G6- | GGCTACACCTTCA | GYTFTTY | ATCTACCCCGGCTCCTCCATCT | IYPGSSI | GCCAGAGAGGACGGCTACGACGCTTG | AREDGYDAWFAY |
| HCzu19 | CCACCTACTGG | W | GC | C | GTTTGCTTAC | [SEQ ID NO: |
| | [SEQ ID | [SEQ ID | [SEQ ID NO: 979] | [SEQ ID | [SEQ ID NO: 981] | 982] |
| | NO: 977] | NO: 978] | | NO: 980] | | |
| 7G6- | GGCTACACCTTCA | GYTFTTY | ATCTACCCCGGCTCCTCCATCT | IYPGSSI | GCCAAAGAGGACGGCTACGACGCTTG | AKEDGYDAWFAY |
| HCzu20 | CCACCTACTGG | W | GC | C | GTTTGCTTAC | [SEQ ID NO: |
| | [SEQ ID NO: | [SEQ ID | [SEQ ID NO: 985] | [SEQ ID | [SEQ ID NO: 987] | 988] |
| | 983] | NO: 984] | | NO: 986] | | |
| 7G6- | GGCTACACCTTCA | GYTFTTY | ATCTACCCCGGCTCCTCCATCT | IYPGSSI | GCTAGAGAGGACGGCTACGACGCTTG | AREDGYDAWFAY |
| HCzu23 | CCACCTACTGG | W | CC | S | GTTTGCCTAC | [SEQ ID NO: |
| | [SEQ ID NO: | [SEQ ID | [SEQ ID NO: 991] | [SEQ ID | [SEQ ID NO: 993] | 994] |
| | 989] | NO: | | NO: | | |
| | | 990] | | 992] | | |
| 7G6- | GGCTACACCTTCA | GYTFTTY | ATCTACCCCGGCTCCTCCATCT | IYPGSSI | GCCAGAGAGGACGGCTACGACGCTTG | AREDGYDAWFAY |
| HCzu24 | CCACCTACTGG | W | CC | S | GTTTGCCTAC | [SEQ ID NO: |
| | [SEQ ID NO: | [SEQ ID | [SEQ ID NO: 997] | [SEQ ID | [SEQ ID NO: 999] | 1000] |
| | 995] | NO: | | NO: | | |
| | | 996] | | 998] | | |
| 7G6- | GGCTACACCTTCA | GYTFTTY | ATCTACCCCGGCTCCTCCATCT | IYPGSSI | GCCAGAGAGGACGGCTACGACGCTTG | AREDGYDAWFAY |
| HCzu25 | CCACCTACTGG | W | CC | S | GTTTGCTTAC | [SEQ ID NO: |
| | [SEQ ID NO: | [SEQ ID | [SEQ ID NO: 1003] | [SEQ ID | [SEQ ID NO: 1005] | 1006] |
| | 1001] | NO: | | NO: | | |
| | | 1002] | | 1004] | | |

7G6 VL numbered according to IMGT

| Clone | | | | | | |
|---|---|---|---|---|---|---|
| Name | | | | | | |
| (Species | | VL CDR1 | | VL CDR2 | | VL CDR3 |
| & | VL CDR1 | Amino Acid | VL CDR2 | Amino Acid | VL CDR3 | Amino Acid |
| Isotype) | DNA Sequence | Sequence | DNA Sequence | Sequence | DNA Sequence | Sequence |
| mouse | CAGAGCATTTTACATAGTAATGGAAACACC | QSILHSNGNT | AAAGTTTC | KVS | TTTCAAGGTTCACATGTTCCATTC | FQGSHVPF |
| 7G6-V_{K} | TAT | Y | C | [SEQ ID | ACG | T |
| | [SEQ ID NO: 1007] | [SEQ ID | [SEQ ID | NO: | [SEQ ID NO: 1011] | [SEQ ID |
| | | NO: 1008] | NO: | 1010] | | NO: |
| | | | 1009] | | | 1012] |
| 7G6- | CAGTCCATCCTGCACTCCAACGGCAACACC | QSILHSNGNT | AAGGTGTC | KVS | TTTCAAGGCTCCCACGTGCCCTTC | FQGSHVPF |
| LCzu1 | TAC | Y | C | [SEQ ID | ACC | T |
| | [SEQ ID NO: 1013] | [SEQ ID | [SEQ ID | NO: | [SEQ ID NO: 1017] | [SEQ ID |
| | | NO: 1014] | NO: | 1016] | | NO: |
| | | | 1015] | | | 1018] |
| 7G6- | CAGTCCATCCTGCACTCCAACGGCAACACC | QSILHSNGNT | AAGGTGTC | KVS | TTTCAAGGCTCCCACGTGCCCTTC | FQGSHVPF |
| LCzu2 | TAC | Y | C | [SEQ ID | ACC | T |
| | [SEQ ID NO: 1019] | [SEQ ID | [SEQ ID | NO: | [SEQ ID NO:1023] | [SEQ ID |
| | | NO: 1020] | NO: | 1022] | | NO: |
| | | | 1021] | | | 1024] |
| 7G6- | CAGTCCATCCTGCACTCCAACGGCAACACC | QSILHSNGNT | AAGGTGTC | KVS | TTTCAAGGCTCCCACGTGCCCTTC | FQGSHVPF |
| LCzu3 | TAC | Y | C | [SEQ ID | ACC | T |
| | [SEQ ID NO: 1025] | [SEQ ID | [SEQ ID | NO: | [SEQ ID NO: 1029] | [SEQ ID |
| | | NO: 1026] | NO: | 1028] | | NO:1030] |
| | | | 1027] | | | |
| 7G6- | CAGTCCATCCTGCACTCCAACGGCAACACC | QSILHSNGNT | AAGGTGTC | KVS | TTTCAAGGCTCCCACGTGCCCTTC | FQGSHVPF |
| LCzu4 | TAC | Y | C | [SEQ ID | ACC | T |
| | [SEQ ID NO: 1031] | [SEQ ID | [SEQ ID | NO: | [SEQ ID NO: 1035] | [SEQ ID |
| | | NO: 1032] | NO: | 1034] | | NO: |
| | | | 1033] | | | 1036] |
| 7G6- | CAGTCCATCCTGCACTCCAACGGCAACACC | QSILHSNGNT | AAGGTGTC | KVS | TTTCAAGGCTCCCACGTGCCCTTC | FQGSHVPF |
| LCzu5 | TAC | Y | C | [SEQ ID | ACC | T |
| | [SEQ ID NO: 1037] | [SEQ ID | [SEQ ID | NO: | [SEQ ID NO: 1041] | [SEQ ID |
| | | NO: 1038] | NO: | 1040] | | NO: |
| | | | 1039] | | | 1042] |
| 7G6- | CAGTCCATCCTGCACTCCAACGGCAACACC | QSILHSNGNT | AAGGTGTC | KVS | TTTCAAGGCTCCCACGTGCCCTTC | FQGSHVPF |
| LCzu6 | TAC | Y | C | [SEQ ID | ACC | T |
| | [SEQ ID NO: 1043] | [SEQ ID | [SEQ ID | NO: | [SEQ ID NO: 1047] | [SEQ ID |
| | | NO: 1044] | NO: | 1046] | | NO: |
| | | | 1045] | | | 1048] |
| 7G6- | CAGTCCATCCTGCACTCCAACGGCAACACC | QSILHSNGNT | AAGGTGTC | KVS | TTTCAAGGCTCCCACGTGCCCTTC | FQGSHVPF |
| LCzu7 | TAC | Y | C | [SEQ ID | ACC | T |
| | [SEQ ID NO: 1049] | [SEQ ID | [SEQ ID | NO: 1052] | [SEQ ID NO: 1053] | [SEQ ID |
| | | NO: 1050] | NO: | | | NO: |
| | | | 1051] | | | 1054] |
| 7G6- | CAGTCCATCGTGCACTCCAACGGCAACACC | QSIVHSNGNT | AAGGTGTC | KVS | TTTCAAGGCTCCCACGTGCCCTTC | FQGSHVPF |
| LCzu8 | TAC | Y | C | [SEQ ID | ACC | T |
| | [SEQ ID NO: 1055] | [SEQ ID | [SEQ ID | NO: | [SEQ ID NO: 1059] | [SEQ ID |
| | | NO: 1056] | NO: | 1058] | | NO: |
| | | | 1057] | | | 1060] |
| 7G6- | CAGTCCATCGTGCACTCCAACGGCAACACC | QSIVHSNGNT | AAGGTGTC | KVS | TTTCAAGGCTCCCACGTGCCCTTC | FQGSHVPF |
| LCzu9 | TAC | Y | C | [SEQ ID | ACC | T |
| | [SEQ ID NO: 1061] | [SEQ ID | [SEQ ID | NO: | [SEQ ID NO: 1065] | [SEQ ID |
| | | NO: 1062] | NO: | 1064] | | NO: |
| | | | 1063] | | | 1066] |
| 7G6- | CAGTCCATCGTGCACTCCAACGGCAACACC | QSIVHSNGNT | AAGGTGTC | KVS | TTTCAAGGCTCCCACGTGCCCTTC | FQGSHVPF |
| LCzu10 | TAC | Y | C | [SEQ ID | ACC | T |
| | [SEQ ID NO: 1067] | [SEQ ID | [SEQ ID | NO: | [SEQ ID NO: 1071] | [SEQ ID |
| | | NO: 1068] | NO: | 1070] | | NO: |
| | | | 1069] | | | 1072] |
| 7G6- | CAGTCCATCCTGCACTCCAACGGCAACACC | QSILHSNGNT | AAGGTGTC | KVS | TTTCAAGGCTCCCACGTGCCCTTC | FQGSHVPF |
| LCzu11 | TAC | Y | C | [SEQ ID | ACC | T |
| | [SEQ ID NO: 1073] | [SEQ ID | [SEQ ID | NO: | [SEQ ID NO: 1077] | [SEQ ID |
| | | NO: 1074] | NO: | 1076] | | NO: |
| | | | 1075] | | | 1078] |
| 7G6- | CAGTCCATCCTGCACTCCAACGGCAACACC | QSILHSNGNT | AAGGTGTC | KVS | TTTCAAGGCTCCCACGTGCCCTTC | FQGSHVPF |
| LCzu12 | TAC | Y | C | [SEQ ID | ACC | T |
| | [SEQ ID NO: 1079] | [SEQ ID | [SEQ ID | NO: 1082] | [SEQ ID NO: 1083] | [SEQ ID |
| | | NO: 1080] | NO: | | | NO: |
| | | | 1081] | | | 1084] |
| 7G6- | CAGTCCATCCTGCACTCCAACGGCAACACC | QSILHSNGNT | AAGGTGTC | KVS | TTTCAAGGCTCCCACGTGCCCTTC | FQGSHVPF |
| LCzu13 | TAC | Y | C | [SEQ ID | ACC | T |
| | [SEQ ID NO: 1085] | [SEQ ID | [SEQ ID | NO: | [SEQ ID NO: 1089] | [SEQ ID |
| | | NO: 1086] | NO: | 1088] | | NO: |
| | | | 1087] | | | 1090] |
| 7G6- | CAGTCCATCCTGCACTCCAACGGCAACACC | QSILHSNGNT | AAGGTGTC | KVS | TTTCAAGGCTCCCACGTGCCCTTC | FQGSHVPF |
| LCzu14 | TAC | Y | C | [SEQ ID | ACC | T |
| | [SEQ ID NO: 1091] | [SEQ ID | [SEQ ID | NO: | [SEQ ID NO: 1095] | [SEQ ID |
| | | NO: 1092] | NO: | 1094] | | NO: |
| | | | 1093] | | | 1096] |
| 7G6- | CAGTCCATCCTGCACTCCAACGGCAACACC | QSILHSNGNT | AAGGTGTC | KVS | TTTCAAGGCTCCCACGTGCCCTTC | FQGSHVPF |
| LCzu15 | TAC | Y | C | [SEQ ID | ACC | T |
| | [SEQ ID NO: 1097] | [SEQ ID | [SEQ ID | NO: | [SEQ ID NO: 1101] | [SEQ ID |
| | | NO: 1098] | NO: | 1100] | | NO: |
| | | | 1099] | | | 1102] |
| 7G6- | CAGTCCATCGTGCACTCCAACGGCAACACC | QSIVHSNGNT | AAGGTGTC | KVS | TTTCAAGGCTCCCACGTGCCCTTC | FQGSHVPF |
| LCzu16 | TAC | Y | C | [SEQ ID | ACC | T |
| | [SEQ ID NO: 1103] | [SEQ ID | [SEQ ID | NO: | [SEQ ID NO: 1107] | [SEQ ID |
| | | NO: 1104] | NO: | 1106] | | NO: |
| | | | 1105] | | | 1108] |
| 7G6- | CAGTCCATCGTGCACTCCAACGGCAACACC | QSIVHSNGNT | AAGGTGTC | KVS | TTTCAAGGCTCCCACGTGCCCTTC | FQGSHVPF |
| LCzu17 | TAC | Y | C | [SEQ ID | ACC | T |
| | [SEQ ID NO: 1109] | [SEQ ID | [SEQ ID | NO: | [SEQ ID NO: 1113] | [SEQ ID |
| | | NO: 1110] | NO: | 1112] | | NO: |
| | | | 1111] | | | 1114] |
| 7G6- | CAGTCCATCCTGCACTCCAACGGCAACACC | QSILHSNGNT | AAGGTGTC | KVS | TTTCAAGGCTCCCACGTGCCCTTC | FQGSHVPF |
| LCzu18 | TAC | Y | C | [SEQ ID | ACC | T |
| | [SEQ ID NO: 1115] | [SEQ ID | [SEQ ID | NO: | [SEQ ID NO: 1119] | [SEQ ID |
| | | NO: 1116] | NO: | 1118] | | NO: |
| | | | 1117] | | | 1120] |
| 7G6- | CAGTCCATCCTGCACTCCAACGGCAACACC | QSILHSNGNT | AAGGTGTC | KVS | TTTCAAGGCTCCCACGTGCCCTTC | FQGSHVPF |
| LCzu21 | TAC | Y | C | [SEQ ID | ACC | T |
| | [SEQ ID NO: 1121] | [SEQ ID | [SEQ ID | NO: | [SEQ ID NO: 1125] | [SEQ ID |
| | | NO: 1122] | NO: | 1124] | | NO: |
| | | | 1123] | | | 1126] |
| 7G6- | CAGTCCATCCTGCACTCCAACGGCAACACC | QSILHSNGNT | AAGGTGTC | KVS | TTTCAAGGCTCCCACGTGCCCTTC | FQGSHVPF |
| LCzu22 | TAC | Y | C | [SEQ ID | ACC | T |
| | [SEQ ID NO: 1127] | [SEQ ID | [SEQ ID | NO: 1130] | [SEQ ID NO: 1131] | [SEQ ID |
| | | NO: 1128] | NO: | | | NO: |
| | | | 1129] | | | 1132] |

[0076] In some embodiments, the anti-Tau antibodies, or antigen-binding fragments thereof, include a heavy chain complementarity determining region 1 (HCDR1), a heavy chain complementarity determining region 2 (HCDR2), and a heavy chain complementarity determining region 3 (HCDR3) as set forth in SEQ ID NO: 196 and a light chain complementarity determining region 1 (LCDR1), a light chain complementarity determining region 2 (LCDR2), and a light chain complementarity determining region 3 (LCDR3) as set forth in SEQ ID NO: 411. In some embodiments, the anti-Tau antibodies, or antigen-binding fragments thereof, include a HCDR1, a HCDR2, and a HCDR3 as set forth in SEQ ID NO: 268 and a LCDR1, a LCDR2, and a LCDR3 as set forth in SEQ ID NO: 465. In some embodiments, the anti-Tau antibodies, or antigen-binding fragments thereof, include a HCDR1, a HCDR2, and a HCDR3 as set forth in SEQ ID NO: 402 and a LCDR1, a LCDR2, and a LCDR3 as set forth in SEQ ID NO: 572.

[0077] In some embodiments, the anti-Tau antibodies or antigen-binding fragments may include a light chain CDR1 amino acid sequence substantially the same as, or identical to, SEQ ID NO: 738, as defined according to the method of Kabat. In some embodiments, antibodies or antigen-binding fragments may include a light chain CDR2 amino acid sequence substantially the same as, or identical to, SEQ ID NO: 740, as defined according to the method of Kabat. In some embodiments, antibodies or antigen-binding fragments may include a light chain CDR3 amino acid sequence substantially the same as, or identical to, SEQ ID NO: 742, as defined according to the method of Kabat. In some embodiments, antibodies or antigen-binding fragments may include a heavy chain CDR1 amino acid sequence substantially the same as, or identical to, SEQ ID NO: 594, as defined according to the method of Kabat. In some embodiments, antibodies or antigen-binding fragments may include a heavy chain CDR2 amino acid sequence substantially the same as, or identical to, SEQ ID NO: 596, as defined according to the method of Kabat. In some embodiments, antibodies or antigen-binding fragments may include a heavy chain CDR3 amino acid sequence substantially the same as, or identical to, SEQ ID NO: 598, as defined according to the method of Kabat. The antibodies or antigen-binding fragments may include a light chain having a CDR1 amino acid sequence substantially the same as, or identical to, SEQ ID NO: 738, as defined according to the method of Kabat; a CDR2 amino acid sequence substantially the same as, or identical to, SEQ ID NO: 740, as defined according to the method of Kabat; and a CDR3 amino acid sequence substantially the same as, or identical to, SEQ ID NO: 742, as defined according to the method of Kabat. The antibodies or antigen-binding fragments may include a heavy chain having a CDR1 amino acid sequence substantially the same as, or identical to, SEQ ID NO: 594, as defined according to the method of Kabat; a CDR2 amino acid sequence substantially the same as, or identical to, SEQ ID NO: 596, as defined according to the method of Kabat; and a CDR3 amino acid sequence substantially the same as, or identical to, SEQ ID NO: 598, as defined according to the method of Kabat. The antibodies or antigen-binding fragments may include a light chain having a CDR1 amino acid sequence substantially the same as, or identical to, SEQ ID NO: 738, as defined according to the method of Kabat; a CDR2 amino acid sequence substantially the same as, or identical to, SEQ ID NO: 740, as defined according to the method of Kabat; and a CDR3 amino acid sequence substantially the same as, or identical to, SEQ ID NO: 742, as defined according to the method of Kabat, and also have a heavy chain having a CDR1 amino acid sequence substantially the same as, or identical to, SEQ ID NO: 594, as defined according to the method of Kabat; a CDR2 amino acid sequence substantially the same as, or identical to, SEQ ID NO: 596, as defined according to the method of Kabat; and a CDR3 amino acid sequence substantially the same as, or identical to, SEQ ID NO: 598, as defined according to the method of Kabat.

[0078] In some embodiments, the anti-Tau antibodies or antigen-binding fragments may include a light chain CDR1 amino acid sequence substantially the same as, or identical to, SEQ ID NO: 1008, as defined by IMGT. In some embodiments, antibodies or antigen-binding fragments may include a light chain CDR2 amino acid sequence substantially the same as, or identical to, SEQ ID NO: 1010, as defined by IMGT. In some embodiments, antibodies or antigen-binding fragments may include a light chain CDR3 amino acid sequence substantially the same as, or identical to, SEQ ID NO: 1012, as defined by IMGT. In some embodiments, antibodies or antigen-binding fragments may include a heavy chain CDR1 amino acid sequence substantially the same as, or identical to, SEQ ID NO: 864, as defined by IMGT. In some embodiments, antibodies or antigen-binding fragments may include a heavy chain CDR2 amino acid sequence substantially the same as, or identical to, SEQ ID NO: 866, as defined by IMGT. In some embodiments, antibodies or antigen-binding fragments may include a heavy chain CDR3 amino acid sequence substantially the same as, or identical to, SEQ ID NO: 868, as defined by IMGT. The antibodies or antigen-binding fragments may include a light chain having a CDR1 amino acid sequence substantially the same as, or identical to, SEQ ID NO: 1008, as defined by IMGT; a CDR2 amino acid sequence substantially the same as, or identical to, SEQ ID NO: 1010, as defined by IMGT; and a CDR3 amino acid sequence substantially the same as, or identical to, SEQ ID NO: 1012, as defined by IMGT. The antibodies or antigen-binding fragments may include a heavy chain having a CDR1 amino acid sequence substantially the same as, or identical to, SEQ ID NO: 864, as defined by IMGT; a CDR2 amino acid sequence substantially the same as, or identical to, SEQ ID NO: 866, as defined by IMGT; and a CDR3 amino acid sequence substantially the same as, or identical to, SEQ ID NO: 868, as defined by IMGT. The antibodies or antigen-binding fragments may include a light chain having a CDR1 amino acid sequence substantially the same as, or identical to, SEQ ID NO: 1008, as defined by IMGT; a CDR2 amino acid sequence substantially the same as, or identical to, SEQ ID NO: 1010, as defined by IMGT; and a CDR3 amino acid sequence substantially the same as, or identical to, SEQ ID NO: 1012, as defined by IMGT, and also have a heavy chain having a CDR1 amino acid sequence substantially the same as, or identical to, SEQ ID NO: 864, as defined by IMGT; a CDR2 amino acid sequence substantially the same as, or identical to, SEQ ID NO: 866, as defined by IMGT; and a CDR3 amino acid sequence substantially the same as, or identical to, SEQ ID NO: 868, as defined by IMGT.

[0079] In some embodiments, the anti-Tau antibodies or antigen-binding fragments may include a light chain CDR1 amino acid sequence substantially the same as, or identical to, SEQ ID NO: 774, as defined according to the method of Kabat. In some embodiments, antibodies or antigen-binding fragments may include a light chain CDR2 amino acid sequence substantially the same as, or identical to, SEQ ID NO: 776, as defined according to the method of Kabat. In some embodiments, antibodies or antigen-binding fragments may include a light chain CDR3 amino acid sequence substantially the same as, or identical to, SEQ ID NO: 778, as defined according to the method of Kabat. In some embodiments, antibodies or antigen-binding fragments may include a heavy chain CDR1 amino acid sequence substantially the same as, or identical to, SEQ ID NO: 642, as defined according to the method of Kabat. In some embodiments, antibodies or antigen-binding fragments may include a heavy chain CDR2 amino acid sequence substantially the same as, or identical to, SEQ ID NO: 644, as defined according to the method of Kabat. In some embodiments, antibodies or antigen-binding fragments may include a heavy chain CDR3 amino acid sequence substantially the same as, or identical to, SEQ ID NO: 646, as defined according to the method of Kabat. The antibodies or antigen-binding fragments may include a light chain having a CDR1 amino acid sequence substantially the same as, or identical to, SEQ ID NO: 774, as defined according to the method of Kabat; a CDR2 amino acid sequence substantially the same as, or identical to, SEQ ID NO: 776, as defined according to the method of Kabat; and a CDR3 amino acid sequence substantially the same as, or identical to, SEQ ID NO: 778, as defined according to the method of Kabat. The antibodies or antigen-binding fragments may include a heavy chain having a CDR1 amino acid sequence substantially the same as, or identical to, SEQ ID NO: 642, as defined according to the method of Kabat; a CDR2 amino acid sequence substantially the same as, or identical to, SEQ ID NO: 644, as defined according to the method of Kabat; and a CDR3 amino acid sequence substantially the same as, or identical to, SEQ ID NO: 646, as defined according to the method of Kabat. The antibodies or antigen-binding fragments may include a light chain having a CDR1 amino acid sequence substantially the same as, or identical to, SEQ ID NO: 774, as defined according to the method of Kabat; a CDR2 amino acid sequence substantially the same as, or identical to, SEQ ID NO: 776, as defined according to the method of Kabat; and a CDR3 amino acid sequence substantially the same as, or identical to, SEQ ID NO: 778, as defined according to the method of Kabat, and also have a heavy chain having a CDR1 amino acid sequence substantially the same as, or identical to, SEQ ID NO: 642, as defined according to the method of Kabat; a CDR2 amino acid sequence substantially the same as, or identical to, SEQ ID NO: 644, as defined according to the method of Kabat; and a CDR3 amino acid sequence substantially the same as, or identical to, SEQ ID NO: 646, as defined according to the method of Kabat.

[0080] In some embodiments, the anti-Tau antibodies or antigen-binding fragments may include a light chain CDR1 amino acid sequence substantially the same as, or identical to, SEQ ID NO: 1044, as defined according to the method of IMGT. In some embodiments, antibodies or antigen-binding fragments may include a light chain CDR2 amino acid sequence substantially the same as, or identical to, SEQ ID NO: 1046, as defined according to the method of IMGT. In some embodiments, antibodies or antigen-binding fragments may include a light chain CDR3 amino acid sequence substantially the same as, or identical to, SEQ ID NO: 1048, as defined according to the method of IMGT. In some embodiments, antibodies or antigen-binding fragments may include a heavy chain CDR1 amino acid sequence substantially the same as, or identical to, SEQ ID NO: 912, as defined according to the method of IMGT. In some embodiments, antibodies or antigen-binding fragments may include a heavy chain CDR2 amino acid sequence substantially the same as, or identical to, SEQ ID NO: 914, as defined according to the method of IMGT. In some embodiments, antibodies or antigen-binding fragments may include a heavy chain CDR3 amino acid sequence substantially the same as, or identical to, SEQ ID NO: 916, as defined according to the method of IMGT. The antibodies or antigen-binding fragments may include a light chain having a CDR1 amino acid sequence substantially the same as, or identical to, SEQ ID NO: 1044, as defined according to the method of IMGT; a CDR2 amino acid sequence substantially the same as, or identical to, SEQ ID NO: 1046, as defined according to the method of IMGT; and a CDR3 amino acid sequence substantially the same as, or identical to, SEQ ID NO: 1048, as defined according to the method of IMGT. The antibodies or antigen-binding fragments may include a heavy chain having a CDR1 amino acid sequence substantially the same as, or identical to, SEQ ID NO: 912, as defined according to the method of IMGT; a CDR2 amino acid sequence substantially the same as, or identical to, SEQ ID NO: 914, as defined according to the method of IMGT; and a CDR3 amino acid sequence substantially the same as, or identical to, SEQ ID NO: 916, as defined according to the method of IMGT. The antibodies or antigen-binding fragments may include a light chain having a CDR1 amino acid sequence substantially the same as, or identical to, SEQ ID NO: 1044, as defined according to the method of IMGT; a CDR2 amino acid sequence substantially the same as, or identical to, SEQ ID NO: 1046, as defined according to the method of IMGT; and a CDR3 amino acid sequence substantially the same as, or identical to, SEQ ID NO: 1048, as defined according to the method of IMGT, and also have a heavy chain having a CDR1 amino acid sequence substantially the same as, or identical to, SEQ ID NO: 912, as defined according to the method of IMGT; a CDR2 amino acid sequence substantially the same as, or identical to, SEQ ID NO: 914, as defined according to the method of IMGT; and a CDR3 amino acid sequence substantially the same as, or identical to, SEQ ID NO: 916, as defined according to the method of IMGT.

[0081] In some embodiments, the anti-Tau antibodies or antigen-binding fragments may include a light chain CDR1 amino acid sequence substantially the same as, or identical to, SEQ ID NO: 846, as defined according to the method of Kabat. In some embodiments, antibodies or antigen-binding fragments may include a light chain CDR2 amino acid sequence substantially the same as, or identical to, SEQ ID NO: 848, as defined according to the method of Kabat. In some embodiments, antibodies or antigen-binding fragments may include a light chain CDR3 amino acid sequence substantially the same as, or identical to, SEQ ID NO: 850, as defined according to the method of Kabat. In some embodiments, antibodies or antigen-binding fragments may include a heavy chain CDR1 amino acid sequence substantially the same as, or identical to, SEQ ID NO: 732, as defined according to the method of Kabat. In some embodiments, antibodies or antigen-binding fragments may include a heavy chain CDR2 amino acid sequence substantially the same as, or identical to, SEQ ID NO: 734, as defined according to the method of Kabat. In some embodiments, antibodies or antigen-binding fragments may include a heavy chain CDR3 amino acid sequence substantially the same as, or identical to, SEQ ID NO: 736, as defined according to the method of Kabat. The antibodies or antigen-binding fragments may include a light chain having a CDR1 amino acid sequence substantially the same as, or identical to, SEQ ID NO: 846, as defined according to the method of Kabat; a CDR2 amino acid sequence substantially the same as, or identical to, SEQ ID NO: 848, as defined according to the method of Kabat; and a CDR3 amino acid sequence substantially the same as, or identical to, SEQ ID NO: 850, as defined according to the method of Kabat. The antibodies or antigen-binding fragments may include a heavy chain having a CDR1 amino acid sequence substantially the same as, or identical to, SEQ ID NO: 732, as defined according to the method of Kabat; a CDR2 amino acid sequence substantially the same as, or identical to, SEQ ID NO: 734, as defined according to the method of Kabat; and a CDR3 amino acid sequence substantially the same as, or identical to, SEQ ID NO: 736, as defined according to the method of Kabat. The antibodies or antigen-binding fragments may include a light chain having a CDR1 amino acid sequence substantially the same as, or identical to, SEQ ID NO: 846, as defined according to the method of Kabat; a CDR2 amino acid sequence substantially the same as, or identical to, SEQ ID NO: 848, as defined according to the method of Kabat; and a CDR3 amino acid sequence substantially the same as, or identical to, SEQ ID NO: 850, as defined according to the method of Kabat, and also have a heavy chain having a CDR1 amino acid sequence substantially the same as, or identical to, SEQ ID NO: 732, as defined according to the method of Kabat; a CDR2 amino acid sequence substantially the same as, or identical to, SEQ ID NO: 734, as defined according to the method of Kabat; and a CDR3 amino acid sequence substantially the same as, or identical to, SEQ ID NO: 736, as defined according to the method of Kabat.

[0082] In some embodiments, the anti-Tau antibodies or antigen-binding fragments may include a light chain CDR1 amino acid sequence substantially the same as, or identical to, SEQ ID NO: 1116, as defined by IMGT. In some embodiments, antibodies or antigen-binding fragments may include a light chain CDR2 amino acid sequence substantially the same as, or identical to, SEQ ID NO: 1118, as defined by IMGT. In some embodiments, antibodies or antigen-binding fragments may include a light chain CDR3 amino acid sequence substantially the same as, or identical to, SEQ ID NO: 1120, as defined by IMGT. In some embodiments, antibodies or antigen-binding fragments may include a heavy chain CDR1 amino acid sequence substantially the same as, or identical to, SEQ ID NO: 1002, as defined by IMGT. In some embodiments, antibodies or antigen-binding fragments may include a heavy chain CDR2 amino acid sequence substantially the same as, or identical to, SEQ ID NO: 1004, as defined by IMGT. In some embodiments, antibodies or antigen-binding fragments may include a heavy chain CDR3 amino acid sequence substantially the same as, or identical to, SEQ ID NO: 1006, as defined by IMGT. The antibodies or antigen-binding fragments may include a light chain having a CDR1 amino acid sequence substantially the same as, or identical to, SEQ ID NO: 1116, as defined by IMGT; a CDR2 amino acid sequence substantially the same as, or identical to, SEQ ID NO: 1118, as defined by IMGT; and a CDR3 amino acid sequence substantially the same as, or identical to, SEQ ID NO: 1120, as defined by IMGT. The antibodies or antigen-binding fragments may include a heavy chain having a CDR1 amino acid sequence substantially the same as, or identical to, SEQ ID NO: 1002, as defined by IMGT; a CDR2 amino acid sequence substantially the same as, or identical to, SEQ ID NO: 1004, as defined by IMGT; and a CDR3 amino acid sequence substantially the same as, or identical to, SEQ ID NO: 1006, as defined by IMGT. The antibodies or antigen-binding fragments may include a light chain having a CDR1 amino acid sequence substantially the same as, or identical to, SEQ ID NO: 1116, as defined by IMGT; a CDR2 amino acid sequence substantially the same as, or identical to, SEQ ID NO: 1118, as defined by IMGT; and a CDR3 amino acid sequence substantially the same as, or identical to, SEQ ID NO: 1120, as defined by IMGT, and also have a heavy chain having a CDR1 amino acid sequence substantially the same as, or identical to, SEQ ID NO: 1002, as defined by IMGT; a CDR2 amino acid sequence substantially the same as, or identical to, SEQ ID NO: 1004, as defined by IMGT; and a CDR3 amino acid sequence substantially the same as, or identical to, SEQ ID NO: 1006, as defined by IMGT.

[0083] Antigen-binding arrangements of CDRs may also be engineered using antibody-like proteins as CDR scaffolding. Such engineered antigen-binding proteins are within the scope of the disclosure.

[0084] In some embodiments of the antibodies or antigen-binding fragments that specifically bind Tau described herein, certain residues are altered to improve the binding and/or folding characteristics of the antibody or antigen-binding fragment. For example, in some embodiments of the disclosed monoclonal antibodies and antigen-binding fragments, the residue at position 49 of the light chain according to the method of Kabat is not cysteine. In some embodiments of the disclosed monoclonal antibodies and antigen-binding fragments, the residue at position 49 of the light chain according to the method of Kabat is serine. In some embodiments of the antibodies or antigen-binding fragments that specifically bind Tau described herein, the residue at position 57 of the heavy chain according to the method of Kabat is not cysteine. In some embodiments, the residue at position 57 of the heavy chain according to the method of Kabat is serine. In some embodiments of the antibodies or antigen-binding fragments that specifically bind Tau described herein, the residue at position 34 of the light chain according to the method of Kabat is glutamate. In some embodiments of the antibodies or antigen-binding fragments that specifically bind Tau described herein, the residue at position 36 of the light chain according to the method of Kabat is not phenylalanine. The residue at position 36 of the light chain according to the method of Kabat may be tyrosine. In some embodiments of the antibodies or antigen-binding fragments that specifically bind Tau described herein, the residue at position 46 of the light chain according to the method of Kabat is not arginine. The residue at position 46 of the light chain according to the method of Kabat may be leucine. In some embodiments of the antibodies or antigen-binding fragments that specifically bind Tau described herein, the residue at position 94 of the heavy chain according to the method of Kabat is not lysine. In some embodiments of the antibodies or antigen-binding fragments that specifically bind Tau described herein, the residue at position 71 of the heavy chain according to the method of Kabat is not arginine. The residue at position 71 of the heavy chain according to the method of Kabat may be valine.

[0085] The described antibodies or antigen-binding fragments that specifically bind Tau may include a light chain variable domain that includes an amino acid sequence substantially the same as, or identical to, SEQ ID NO: 411. In some aspects, an isolated polynucleotide that encodes a sequence substantially the same as, or identical to, SEQ ID NO: 411 is provided. In some embodiments, an isolated polynucleotide that includes a sequence substantially the same as, or identical to, SEQ ID NO: 410 may encode this light chain variable domain amino acid sequence. The described antibodies or antigen-binding fragments that specifically bind Tau may include a heavy chain variable domain that includes an amino acid sequence substantially the same as, or identical to, SEQ ID NO: 196. In some aspects, an isolated polynucleotide that encodes a sequence substantially the same as, or identical to, SEQ ID NO: 196 is provided. In some embodiments, an isolated polynucleotide that includes a sequence substantially the same as, or identical to, SEQ ID NO: 195 may encode this heavy chain variable domain amino acid sequence. The described antibodies or antigen-binding fragments that specifically bind Tau may include a light chain variable domain and a heavy chain variable domain, wherein the light chain variable domain includes an amino acid sequence substantially the same as, or identical to, SEQ ID NO: 411, and the heavy chain variable domain includes an amino acid sequence substantially the same as, or identical to, SEQ ID NO: 196. In some aspects, an isolated polynucleotide that encodes a sequence substantially the same as, or identical to, SEQ ID NO: 411 and a sequence substantially the same as, or identical to, SEQ ID NO: 196 is provided. In some embodiments an isolated polynucleotide that includes a sequence substantially the same as, or identical to, SEQ ID NO: 410 and a sequence substantially the same as, or identical to, SEQ ID NO: 195 is provided.

[0086] The described antibodies or antigen-binding fragments that specifically bind Tau may include a light chain variable domain that includes an amino acid sequence substantially the same as, or identical to, SEQ ID NO: 465. In some aspects, an isolated polynucleotide that encodes a sequence substantially the same as, or identical to, SEQ ID NO: 465 is provided. In some embodiments, an isolated polynucleotide that includes a sequence substantially the same as, or identical to, SEQ ID NO: 464 may encode this light chain variable domain amino acid sequence. The described antibodies or antigen-binding fragments that specifically bind Tau may include a heavy chain variable domain that includes an amino acid sequence substantially the same as, or identical to, SEQ ID NO: 268. In some aspects, an isolated polynucleotide that encodes a sequence substantially the same as, or identical to, SEQ ID NO: 268 is provided. In some embodiments, an isolated polynucleotide that includes a sequence substantially the same as, or identical to, SEQ ID NO: 267 may encode this heavy chain variable domain amino acid sequence. The described antibodies or antigen-binding fragments that specifically bind Tau may include a light chain variable domain and a heavy chain variable domain, wherein the light chain variable domain includes an amino acid sequence substantially the same as, or identical to, SEQ ID NO: 465, and the heavy chain variable domain includes an amino acid sequence substantially the same as, or identical to, SEQ ID NO: 268. In some aspects, an isolated polynucleotide that encodes a sequence substantially the same as, or identical to, SEQ ID NO: 465 and a sequence substantially the same as, or identical to, SEQ ID NO: 268 is provided. In some embodiments an isolated polynucleotide that includes a sequence substantially the same as, or identical to, SEQ ID NO: 464 and a sequence substantially the same as, or identical to, SEQ ID NO: 267 is provided.

[0087] The described antibodies or antigen-binding fragments that specifically bind Tau may include a light chain variable domain that includes an amino acid sequence substantially the same as, or identical to, SEQ ID NO: 581. In some aspects, an isolated polynucleotide that encodes a sequence substantially the same as, or identical to, SEQ ID NO: 581 is provided. In some embodiments, an isolated polynucleotide that includes a sequence substantially the same as, or identical to, SEQ ID NO: 580 may encode this light chain variable domain amino acid sequence. The described antibodies or antigen-binding fragments that specifically bind Tau may include a heavy chain variable domain that includes an amino acid sequence substantially the same as, or identical to, SEQ ID NO: 268. In some aspects, an isolated polynucleotide that encodes a sequence substantially the same as, or identical to, SEQ ID NO: 268 is provided. In some embodiments, an isolated polynucleotide that includes a sequence substantially the same as, or identical to, SEQ ID NO: 267 may encode this heavy chain variable domain amino acid sequence. The described antibodies or antigen-binding fragments that specifically bind Tau may include a light chain variable domain and a heavy chain variable domain, wherein the light chain variable domain includes an amino acid sequence substantially the same as, or identical to, SEQ ID NO: 581, and the heavy chain variable domain includes an amino acid sequence substantially the same as, or identical to, SEQ ID NO: 268. In some aspects, an isolated polynucleotide that encodes a sequence substantially the same as, or identical to, SEQ ID NO: 581 and a sequence substantially the same as, or identical to, SEQ ID NO: 268 is provided. In some embodiments an isolated polynucleotide that includes a sequence substantially the same as, or identical to, SEQ ID NO: 580 and a sequence substantially the same as, or identical to, SEQ ID NO: 267 is provided.

[0088] The described antibodies or antigen-binding fragments that specifically bind Tau may include a light chain variable domain that includes an amino acid sequence substantially the same as, or identical to, SEQ ID NO: 545. In some aspects, an isolated polynucleotide that encodes a sequence substantially the same as, or identical to, SEQ ID NO: 545 is provided. In some embodiments, an isolated polynucleotide that includes a sequence substantially the same as, or identical to, SEQ ID NO: 544 may encode this light chain variable domain amino acid sequence. The described antibodies or antigen-binding fragments that specifically bind Tau may include a heavy chain variable domain that includes an amino acid sequence substantially the same as, or identical to, SEQ ID NO: 384. In some aspects, an isolated polynucleotide that encodes a sequence substantially the same as, or identical to, SEQ ID NO: 384 is provided. In some embodiments, an isolated polynucleotide that includes a sequence substantially the same as, or identical to, SEQ ID NO: 383 may encode this heavy chain variable domain amino acid sequence. The described antibodies or antigen-binding fragments that specifically bind Tau may include a light chain variable domain and a heavy chain variable domain, wherein the light chain variable domain includes an amino acid sequence substantially the same as, or identical to, SEQ ID NO: 545, and the heavy chain variable domain includes an amino acid sequence substantially the same as, or identical to, SEQ ID NO: 384. In some aspects, an isolated polynucleotide that encodes a sequence substantially the same as, or identical to, SEQ ID NO: 545 and a sequence substantially the same as, or identical to, SEQ ID NO: 384 is provided. In some embodiments an isolated polynucleotide that includes a sequence substantially the same as, or identical to, SEQ ID NO: 544 and a sequence substantially the same as, or identical to, SEQ ID NO: 383 is provided.

[0089] The described antibodies or antigen-binding fragments that specifically bind Tau may include a light chain variable domain that includes an amino acid sequence substantially the same as, or identical to, SEQ ID NO: 545. In some aspects, an isolated polynucleotide that encodes a sequence substantially the same as, or identical to, SEQ ID NO: 545 is provided. In some embodiments, an isolated polynucleotide that includes a sequence substantially the same as, or identical to, SEQ ID NO: 544 may encode this light chain variable domain amino acid sequence. The described antibodies or antigen-binding fragments that specifically bind Tau may include a heavy chain variable domain that includes an amino acid sequence substantially the same as, or identical to, SEQ ID NO: 393. In some aspects, an isolated polynucleotide that encodes a sequence substantially the same as, or identical to, SEQ ID NO: 393 is provided. In some embodiments, an isolated polynucleotide that includes a sequence substantially the same as, or identical to, SEQ ID NO: 392 may encode this heavy chain variable domain amino acid sequence. The described antibodies or antigen-binding fragments that specifically bind Tau may include a light chain variable domain and a heavy chain variable domain, wherein the light chain variable domain includes an amino acid sequence substantially the same as, or identical to, SEQ ID NO: 545, and the heavy chain variable domain includes an amino acid sequence substantially the same as, or identical to, SEQ ID NO: 393. In some aspects, an isolated polynucleotide that encodes a sequence substantially the same as, or identical to, SEQ ID NO: 545 and a sequence substantially the same as, or identical to, SEQ ID NO: 393 is provided. In some embodiments an isolated polynucleotide that includes a sequence substantially the same as, or identical to, SEQ ID NO: 544 and a sequence substantially the same as, or identical to, SEQ ID NO: 392 is provided.

[0090] The described antibodies or antigen-binding fragments that specifically bind Tau may include a light chain variable domain that includes an amino acid sequence substantially the same as, or identical to, SEQ ID NO: 545. In some aspects, an isolated polynucleotide that encodes a sequence substantially the same as, or identical to, SEQ ID NO: 545 is provided. In some embodiments, an isolated polynucleotide that includes a sequence substantially the same as, or identical to, SEQ ID NO: 544 may encode this light chain variable domain amino acid sequence. The described antibodies or antigen-binding fragments that specifically bind Tau may include a heavy chain variable domain that includes an amino acid sequence substantially the same as, or identical to, SEQ ID NO: 402. In some aspects, an isolated polynucleotide that encodes a sequence substantially the same as, or identical to, SEQ ID NO: 402 is provided. In some embodiments, an isolated polynucleotide that includes a sequence substantially the same as, or identical to, SEQ ID NO: 401 may encode this heavy chain variable domain amino acid sequence. The described antibodies or antigen-binding fragments that specifically bind Tau may include a light chain variable domain and a heavy chain variable domain, wherein the light chain variable domain includes an amino acid sequence substantially the same as, or identical to, SEQ ID NO: 545, and the heavy chain variable domain includes an amino acid sequence substantially the same as, or identical to, SEQ ID NO: 402. In some aspects, an isolated polynucleotide that encodes a sequence substantially the same as, or identical to, SEQ ID NO: 545 and a sequence substantially the same as, or identical to, SEQ ID NO: 402 is provided. In some embodiments an isolated polynucleotide that includes a sequence substantially the same as, or identical to, SEQ ID NO: 544 and a sequence substantially the same as, or identical to, SEQ ID NO: 401 is provided.

[0091] The described antibodies or antigen-binding fragments that specifically bind Tau may include a light chain variable domain that includes an amino acid sequence substantially the same as, or identical to, SEQ ID NO: 572. In some aspects, an isolated polynucleotide that encodes a sequence substantially the same as, or identical to, SEQ ID NO: 572 is provided. In some embodiments, an isolated polynucleotide that includes a sequence substantially the same as, or identical to, SEQ ID NO: 571 may encode this light chain variable domain amino acid sequence. The described antibodies or antigen-binding fragments that specifically bind Tau may include a heavy chain variable domain that includes an amino acid sequence substantially the same as, or identical to, SEQ ID NO: 384. In some aspects, an isolated polynucleotide that encodes a sequence substantially the same as, or identical to, SEQ ID NO: 384 is provided. In some embodiments, an isolated polynucleotide that includes a sequence substantially the same as, or identical to, SEQ ID NO: 383 may encode this heavy chain variable domain amino acid sequence. The described antibodies or antigen-binding fragments that specifically bind Tau may include a light chain variable domain and a heavy chain variable domain, wherein the light chain variable domain includes an amino acid sequence substantially the same as, or identical to, SEQ ID NO: 572, and the heavy chain variable domain includes an amino acid sequence substantially the same as, or identical to, SEQ ID NO: 384. In some aspects, an isolated polynucleotide that encodes a sequence substantially the same as, or identical to, SEQ ID NO: 572 and a sequence substantially the same as, or identical to, SEQ ID NO: 384 is provided. In some embodiments an isolated polynucleotide that includes a sequence substantially the same as, or identical to, SEQ ID NO: 571 and a sequence substantially the same as, or identical to, SEQ ID NO: 383 is provided.

[0092] The described antibodies or antigen-binding fragments that specifically bind Tau may include a light chain variable domain that includes an amino acid sequence substantially the same as, or identical to, SEQ ID NO: 572. In some aspects, an isolated polynucleotide that encodes a sequence substantially the same as, or identical to, SEQ ID NO: 572 is provided. In some embodiments, an isolated polynucleotide that includes a sequence substantially the same as, or identical to, SEQ ID NO: 571 may encode this light chain variable domain amino acid sequence. The described antibodies or antigen-binding fragments that specifically bind Tau may include a heavy chain variable domain that includes an amino acid sequence substantially the same as, or identical to, SEQ ID NO: 393. In some aspects, an isolated polynucleotide that encodes a sequence substantially the same as, or identical to, SEQ ID NO: 393 is provided. In some embodiments, an isolated polynucleotide that includes a sequence substantially the same as, or identical to, SEQ ID NO: 392 may encode this heavy chain variable domain amino acid sequence. The described antibodies or antigen-binding fragments that specifically bind Tau may include a light chain variable domain and a heavy chain variable domain, wherein the light chain variable domain includes an amino acid sequence substantially the same as, or identical to, SEQ ID NO: 572, and the heavy chain variable domain includes an amino acid sequence substantially the same as, or identical to, SEQ ID NO: 393. In some aspects, an isolated polynucleotide that encodes a sequence substantially the same as, or identical to, SEQ ID NO: 572 and a sequence substantially the same as, or identical to, SEQ ID NO: 393 is provided. In some embodiments an isolated polynucleotide that includes a sequence substantially the same as, or identical to, SEQ ID NO: 571 and a sequence substantially the same as, or identical to, SEQ ID NO: 392 is provided.

[0093] The described antibodies or antigen-binding fragments that specifically bind Tau may include a light chain variable domain that includes an amino acid sequence substantially the same as, or identical to, SEQ ID NO: 572. In some aspects, an isolated polynucleotide that encodes a sequence substantially the same as, or identical to, SEQ ID NO: 572 is provided. In some embodiments, an isolated polynucleotide that includes a sequence substantially the same as, or identical to, SEQ ID NO: 571 may encode this light chain variable domain amino acid sequence. The described antibodies or antigen-binding fragments that specifically bind Tau may include a heavy chain variable domain that includes an amino acid sequence substantially the same as, or identical to, SEQ ID NO: 402. In some aspects, an isolated polynucleotide that encodes a sequence substantially the same as, or identical to, SEQ ID NO: 402 is provided. In some embodiments, an isolated polynucleotide that includes a sequence substantially the same as, or identical to, SEQ ID NO: 401 may encode this heavy chain variable domain amino acid sequence. The described antibodies or antigen-binding fragments that specifically bind Tau may include a light chain variable domain and a heavy chain variable domain, wherein the light chain variable domain includes an amino acid sequence substantially the same as, or identical to, SEQ ID NO: 572, and the heavy chain variable domain includes an amino acid sequence substantially the same as, or identical to, SEQ ID NO: 402. In some aspects, an isolated polynucleotide that encodes a sequence substantially the same as, or identical to, SEQ ID NO: 572 and a sequence substantially the same as, or identical to, SEQ ID NO: 402 is provided. In some embodiments an isolated polynucleotide that includes a sequence substantially the same as, or identical to, SEQ ID NO: 571 and a sequence substantially the same as, or identical to, SEQ ID NO: 401 is provided.

[0094] In some embodiments, the antibodies that specifically bind Tau are produced by antibody-producing cells deposited with the American Type Culture Collection (10801 University Blvd., Manassas, Virginia 20110-2209) on Oct. 11, 2017 and have been assigned Accession No. PTA-124523 or PTA-124524. In some embodiments, the antibodies, or antigen-binding fragments thereof, have the binding affinity for monomeric wild-type 2N4R Tau of the antibodies produced by the deposited antibody-producing cells as measured by surface plasmon resonance. In some embodiments, the disclosed antibodies, or antigen-binding fragments thereof, comprise the light and heavy chain CDRs of the antibodies produced by the deposited antibody-producing cells. In some embodiments, the antibodies, or antigen-binding fragments thereof, comprise the light and heavy chain variable regions of the antibodies produced by the deposited antibody-producing cells.

[0095] The antibodies or antigen-binding fragments that specifically bind Tau described herein include variants having single or multiple amino acid substitutions, deletions, or additions that retain the biological properties (e.g., binding affinity or immune effector activity) of the described antibodies or antigen-binding fragments. The skilled person may produce variants having single or multiple amino acid substitutions, deletions, or additions. These variants may include: (a) variants in which one or more amino acid residues are substituted with conservative or nonconservative amino acids, (b) variants in which one or more amino acids are added to or deleted from the polypeptide, (c) variants in which one or more amino acids include a substituent group, and (d) variants in which the polypeptide is fused with another peptide or polypeptide such as a fusion partner, a protein tag or other chemical moiety, that may confer useful properties to the polypeptide, such as, for example, an epitope for an antibody, a polyhistidine sequence, a biotin moiety and the like. Antibodies or antigen-binding fragments described herein may include variants in which amino acid residues from one species are substituted for the corresponding residue in another species, either at the conserved or nonconserved positions. In other embodiments, amino acid residues at nonconserved positions are substituted with conservative or nonconservative residues. The techniques for obtaining these variants, including genetic (suppressions, deletions, mutations, etc.), chemical, and enzymatic techniques, are known to the person having ordinary skill in the art.

[0096] The antibodies or antigen-binding fragments described herein have binding affinities (in nM) for wild-type monomeric 2N4R Tau that include a dissociation constant (K_{D}) of less than about 1×10⁻⁸ M as measured by surface plasmon resonance. In certain embodiments, the antibodies or antigen-binding fragments described herein have binding affinities (in nM) for wild-type monomeric 2N4R Tau that include a dissociation constant (K_{D}) of less than about 0.5 nM as measured by surface plasmon resonance. In certain embodiments, the antibodies or antigen-binding fragments described herein have binding affinities (in nM) for wild-type monomeric 2N4R Tau that include a dissociation constant (K_{D}) of less than about 0.3 nM as measured by surface plasmon resonance. In certain embodiments, the antibodies or antigen-binding fragments described herein have binding affinities (in nM) for wild-type monomeric 2N4R Tau that include a dissociation constant (K_{D}) of less than about 0.2 nM as measured by surface plasmon resonance. In certain embodiments, the antibodies or antigen-binding fragments described herein have binding affinities (in nM) for wild-type monomeric 2N4R Tau that include a dissociation constant (K_{D}) of less than about 0.15 nM as measured by surface plasmon resonance. In certain embodiments, the antibodies or antigen-binding fragments described herein have binding affinities (in nM) for wild-type monomeric 2N4R Tau that include a dissociation constant (K_{D}) of less than about 0.1 nM as measured by surface plasmon resonance.

[0097] In any of the embodiments of the antibodies or antigen-binding fragments that specifically bind Tau described herein, the antibodies or antigen-binding fragments may bind an epitope comprising HVPG (SEQ ID NO: 1133). In some embodiments, the antibodies or antigen-binding fragments that specifically bind Tau described herein are biepitopic. In certain aspects, the antibodies or antigen-binding fragments that specifically bind Tau described herein bind one or more epitopes within Tau comprising HVPG (SEQ ID NO: 1133). This sequence appears twice in human 2N4R Tau. The first site is in 2N4R Tau within the second repeat region at residues 299-302 and the second site within the fourth repeat region at residues 362-365.

[0098] In any of the embodiments of the antibodies or antigen-binding fragments that specifically bind Tau described herein, the antibodies or antigen-binding fragments may bind an epitope comprising HVPGG (SEQ ID NO: 79). In some embodiments, the antibodies or antigen-binding fragments that specifically bind Tau described herein are biepitopic. In certain aspects, the antibodies or antigen-binding fragments that specifically bind Tau described herein bind one or more epitopes within Tau comprising HVPGG (SEQ ID NO: 79). This sequence appears twice in human 2N4R Tau. The first site is in 2N4R Tau within the second repeat region at residues 299-303 and the second site within the fourth repeat region at residues 362-366. In certain aspects, the antibodies or antigen-binding fragments that specifically bind Tau bind the epitope within Tau comprising HVPGG (SEQ ID NO: 79) within repeat region 2 or repeat region 4 with a peptide binding preference that is at least 10-fold, preferably at least 20-fold, and more preferably at least 30-fold greater than binding to an epitope within Tau comprising HKPGG (SEQ ID NO: 182) within repeat region 3 as determined by a peptide binding assay (e.g., the peptide binding assay described in Example 3). In certain aspects, the antibodies or antigen-binding fragments that specifically bind Tau bind the epitope within Tau comprising HVPGG (SEQ ID NO: 79) within repeat region 2 or repeat region 4 with a peptide binding preference that is at least 10-fold, preferably at least 20-fold, and more preferably at least 30-fold greater than binding to an epitope within Tau comprising HQPGG (SEQ ID NO: 183) within repeat region 1, as determined by a peptide binding assay (e.g., the peptide binding assay described in Example 3). In certain aspects, the antibodies or antigen-binding fragments that specifically bind Tau bind the epitope within Tau comprising HVPGG (SEQ ID NO: 79) within repeat region 2 or repeat region 4 with a peptide binding preference that is at least 10-fold, preferably at least 20-fold, and more preferably at least 30-fold greater than binding to an epitope within Tau comprising HKPGG (SEQ ID NO: 182) within repeat region 3 and that is at least 10-fold, preferably at least and more preferably at least 30-fold greater than binding to an epitope comprising HQPGG (SEQ ID NO: 183) within repeat region 1, as determined by a peptide binding assay (e.g., the peptide binding assay described in Example 3). In certain aspects, the antibodies or antigen-binding fragments that specifically bind Tau do not bind an epitope within naturally occurring mutant P301S Tau comprising HVSGG (SEQ ID NO: 184) within repeat region 2 as determined by a peptide binding assay (e.g., the peptide binding assay described in Example 4). In certain aspects, the antibodies or antigen-binding fragments that specifically bind Tau do not bind an epitope within naturally occurring mutant P301L Tau comprising HVLGG (SEQ ID NO: 185) within repeat region 2 as determined by a peptide binding assay (e.g., the peptide binding assay described in Example 4). The amino acid sequence HVSGG (SEQ ID NO: 184) is present at residues 299-303 in the 2N4R Tau sequence of P301S in vitro and in vivo Tauopathy models. The amino acid sequence HVLGG (SEQ ID NO: 185) is present at residues 299-303 of the 2N4R Tau sequence of P301L in vitro and in vivo Tauopathy models. Antibodies or antigen-binding fragments as provided herein that preferably bind one or more epitopes within Tau comprising HVPGG (SEQ ID NO: 79) within repeat region 2 or repeat region 4 relative to an epitope comprising HKPGG (SEQ ID NO: 182 within repeat region 3 or HQPGG (SEQ ID NO: 183) within repeat region 1 and do not bind an epitope comprising HVSGG (SEQ ID NO: 184), or HVLGG (SEQ ID NO: 185) within repeat region 2 bind 2N4R Tau P301S/L at residues 362-366. Surprisingly, as demonstrated herein, the described antibodies or antigen-binding fragments that preferably bind one or more epitopes within Tau comprising HVPGG (SEQ ID NO: 79) within repeat region 2 or repeat region 4 relative to an epitope comprising HKPGG (SEQ ID NO: 182) within repeat region 3 or HQPGG (SEQ ID NO: 183) within repeat region 1 and that do not exhibit binding to an epitope comprising HVSGG (SEQ ID NO: 184) or HVLGG (SEQ ID NO: 185) within repeat region 2 reduce Tau seeding and transmission in vivo.

[0099] In certain embodiments, labelled anti-Tau antibodies are provided. Labels include, but are not limited to, labels or moieties that are detected directly (e.g., fluorescent, chromophoric, electron-dense, chemiluminescent, and radioactive labels) and labels and moieties (e.g., enzymes or ligands) that are detected indirectly (e.g., through enzymatic reaction or, molecular interaction). Exemplary labels include but are not limited to radiolabels (e.g., ³²P, ¹⁴C, ¹¹¹I, ¹²⁵I, ³H, ¹³¹I), fluorescent labels (such as DyLight™ 649), epitope tags, biotin, chromophore labels, ECL labels, or enzymes. More specifically, the described labels include ruthenium, DOTA, ¹¹¹In-diethylenetriaminepentaacetic acid (DTPA), horseradish peroxidase, alkaline phosphatase and beta-galactosidase, poly-histidine (HIS tag), acridine dyes, cyanine dyes, fluorone dyes, oxazin dyes, phenanthridine dyes, rhodamine dyes, Alexafluor™ dyes, and the like.

[0100] Also disclosed are isolated polynucleotides that encode antibodies or antigen-binding fragments that specifically bind to Tau. In some embodiments, the isolated polynucleotides encode an antibody or antigen-binding fragment thereof having a light chain CDR1 sequence defined according to Kabat substantially the same as, or identical to, SEQ ID NO: 738, for example SEQ ID NO: 737. In some embodiments, the isolated polynucleotides encode an antibody or antigen-binding fragment thereof having a light chain CDR2 defined according to Kabat substantially the same as, or identical to, SEQ ID NO: 740, for example SEQ ID NO: 739. In some embodiments, the isolated polynucleotides encode an antibody or antigen-binding fragment thereof having a light chain CDR3 defined according to Kabat substantially the same as, or identical to, SEQ ID NO: 742, for example SEQ ID NO: 741. In some embodiments, the isolated polynucleotides encode an antibody or antigen-binding fragment thereof having a heavy chain CDR1 defined according to Kabat substantially the same as, or identical to, SEQ ID NO: 594, for example SEQ ID NO: 593. In some embodiments, the isolated polynucleotides encode an antibody or antigen-binding fragment thereof having a heavy chain CDR2 defined according to Kabat substantially the same as, or identical to, SEQ ID NO: 596, for example SEQ ID NO: 595. In some embodiments, the isolated polynucleotides encode an antibody or antigen-binding fragment thereof having a heavy chain CDR3 defined according to Kabat substantially the same as, or identical to, SEQ ID NO: 598, for example SEQ ID NO: 597. The isolated polynucleotides may encode an antibody or antigen-binding fragment thereof having a light chain with a CDR1 substantially the same as, or identical to, SEQ ID NO: 738, for example SEQ ID NO: 737; a CDR2 substantially the same as, or identical to, SEQ ID NO: 740, for example SEQ ID NO: 739; and a CDR3 substantially the same as, or identical to, SEQ ID NO: 742, for example SEQ ID NO: 741, defined according to Kabat. The isolated polynucleotides may encode an antibody or antigen-binding fragment thereof having a heavy chain CDR1 substantially the same as, or identical to, SEQ ID NO: 594, for example SEQ ID NO: 593; a CDR2 substantially the same as, or identical to, SEQ ID NO: 596, for example SEQ ID NO: 595; and a CDR3 substantially the same as, or identical to, SEQ ID NO: 598, for example SEQ ID NO: 597, defined according to Kabat. The isolated polynucleotides may encode an antibody or antigen-binding fragment thereof having a light chain CDR1 substantially the same as, or identical to, SEQ ID NO: 738, for example SEQ ID NO: 737; a CDR2 encoded by a nucleotide sequence substantially the same as, or identical to, SEQ ID NO: 740, for example SEQ ID NO: 739; and a CDR3 encoded by a nucleotide sequence substantially the same as, or identical to, SEQ ID NO: 742, for example SEQ ID NO: 741; and a heavy chain CDR1 substantially the same as, or identical to, SEQ ID NO: 594, for example SEQ ID NO: 593; a CDR2 substantially the same as, or identical to, SEQ ID NO: 596, for example SEQ ID NO: 595; and a CDR3 substantially the same as, or identical to, SEQ ID NO: 598, for example SEQ ID NO: 597, defined according to Kabat.

[0101] In some embodiments, the isolated polynucleotides encode an antibody or antigen-binding fragment thereof having a light chain CDR1 sequence defined according to IMGT substantially the same as, or identical to, SEQ ID NO: 1008, for example SEQ ID NO: 1007. In some embodiments, the isolated polynucleotides encode an antibody or antigen-binding fragment thereof having a light chain CDR2 defined according to IMGT substantially the same as, or identical to, SEQ ID NO: 1010, for example SEQ ID NO: 1009. In some embodiments, the isolated polynucleotides encode an antibody or antigen-binding fragment thereof having a light chain CDR3 defined according to IMGT substantially the same as, or identical to, SEQ ID NO: 1012, for example SEQ ID NO: 1011. In some embodiments, the isolated polynucleotides encode an antibody or antigen-binding fragment thereof having a heavy chain CDR1 defined according to IMGT substantially the same as, or identical to, SEQ ID NO: 864, for example SEQ ID NO: 863. In some embodiments, the isolated polynucleotides encode an antibody or antigen-binding fragment thereof having a heavy chain CDR2 defined according to IMGT substantially the same as, or identical to, SEQ ID NO: 866, for example SEQ ID NO: 865. In some embodiments, the isolated polynucleotides encode an antibody or antigen-binding fragment thereof having a heavy chain CDR3 defined according to IMGT substantially the same as, or identical to, SEQ ID NO: 868, for example SEQ ID NO: 867. The isolated polynucleotides may encode an antibody or antigen-binding fragment thereof having a light chain with a CDR1 substantially the same as, or identical to, SEQ ID NO: 1008, for example SEQ ID NO: 1007; a CDR2 substantially the same as, or identical to, SEQ ID NO: 1010, for example SEQ ID NO: 1009; and a CDR3 substantially the same as, or identical to, SEQ ID NO: 1012, for example SEQ ID NO: 1011, defined according to IMGT. The isolated polynucleotides may encode an antibody or antigen-binding fragment thereof having a heavy chain CDR1 substantially the same as, or identical to, SEQ ID NO: 864, for example SEQ ID NO: 863; a CDR2 substantially the same as, or identical to, SEQ ID NO: 866, for example SEQ ID NO: 865; and a CDR3 substantially the same as, or identical to, SEQ ID NO: 868, for example SEQ ID NO: 867, defined according to IMGT. The isolated polynucleotides may encode an antibody or antigen-binding fragment thereof having a light chain CDR1 substantially the same as, or identical to, SEQ ID NO: 1008, for example SEQ ID NO: 1007; a CDR2 encoded by a nucleotide sequence substantially the same as, or identical to, SEQ ID NO: 1010, for example SEQ ID NO: 1009; and a CDR3 encoded by a nucleotide sequence substantially the same as, or identical to, SEQ ID NO: 1012, for example SEQ ID NO: 1011; and a heavy chain CDR1 substantially the same as, or identical to, SEQ ID NO: 864, for example SEQ ID NO: 863; a CDR2 substantially the same as, or identical to, SEQ ID NO: 866, for example SEQ ID NO: 865; and a CDR3 substantially the same as, or identical to, SEQ ID NO: 868, for example SEQ ID NO: 867, defined according to IMGT.

[0102] In some embodiments, the isolated polynucleotides encode an antibody or antigen-binding fragment thereof having a light chain CDR1 sequence substantially the same as, or identical to, SEQ ID NO: 774, defined according to Kabat, for example SEQ ID NO: 773. In some embodiments, the isolated polynucleotides encode an antibody or antigen-binding fragment thereof having a light chain CDR2 substantially the same as, or identical to, SEQ ID NO: 776, defined according to Kabat, for example SEQ ID NO: 775. In some embodiments, the isolated polynucleotides encode an antibody or antigen-binding fragment thereof having a light chain CDR3 substantially the same as, or identical to, SEQ ID NO: 778, defined according to Kabat, for example SEQ ID NO: 777. In some embodiments, the isolated polynucleotides encode an antibody or antigen-binding fragment thereof having a heavy chain CDR1 substantially the same as, or identical to, SEQ ID NO: 642, defined according to Kabat, for example SEQ ID NO: 641. In some embodiments, the isolated polynucleotides encode an antibody or antigen-binding fragment thereof having a heavy chain CDR2 substantially the same as, or identical to, SEQ ID NO: 644, defined according to Kabat, for example SEQ ID NO: 643. In some embodiments, the isolated polynucleotides encode an antibody or antigen-binding fragment thereof having a heavy chain CDR3 substantially the same as, or identical to, SEQ ID NO: 646, defined according to Kabat, for example SEQ ID NO: 645. The isolated polynucleotides may encode an antibody or antigen-binding fragment thereof having a light chain with a CDR1 substantially the same as, or identical to, SEQ ID NO: 774, for example SEQ ID NO: 773; a CDR2 substantially the same as, or identical to, SEQ ID NO: 776, for example SEQ ID NO: 775; and a CDR3 substantially the same as, or identical to, SEQ ID NO: 778, for example SEQ ID NO: 777, defined according to Kabat. The isolated polynucleotides may encode an antibody or antigen-binding fragment thereof having a heavy chain CDR1 substantially the same as, or identical to, SEQ ID NO: 642, for example SEQ ID NO: 641; a CDR2 substantially the same as, or identical to, SEQ ID NO: 644, for example SEQ ID NO: 643; and a CDR3 substantially the same as, or identical to, SEQ ID NO: 646, for example SEQ ID NO: 645, defined according to Kabat. The isolated polynucleotides may encode an antibody or antigen-binding fragment thereof having a light chain CDR1 substantially the same as, or identical to, SEQ ID NO: 774, for example SEQ ID NO: 773; a CDR2 encoded by a nucleotide sequence substantially the same as, or identical to, SEQ ID NO: 776, for example SEQ ID NO: 775; and a CDR3 encoded by a nucleotide sequence substantially the same as, or identical to, SEQ ID NO: 778, for example SEQ ID NO: 777; and a heavy chain CDR1 substantially the same as, or identical to, SEQ ID NO: 642, for example SEQ ID NO: 641; a CDR2 substantially the same as, or identical to, SEQ ID NO: 644, for example SEQ ID NO: 643; and a CDR3 substantially the same as, or identical to, SEQ ID NO: 646, for example SEQ ID NO: 645, defined according to Kabat.

[0103] In some embodiments, the isolated polynucleotides encode an antibody or antigen-binding fragment thereof having a light chain CDR1 sequence substantially the same as, or identical to, SEQ ID NO: 1044, defined according to IMGT, for example SEQ ID NO: 1043. In some embodiments, the isolated polynucleotides encode an antibody or antigen-binding fragment thereof having a light chain CDR2 substantially the same as, or identical to, SEQ ID NO: 1046, defined according to IMGT, for example SEQ ID NO: 1045. In some embodiments, the isolated polynucleotides encode an antibody or antigen-binding fragment thereof having a light chain CDR3 substantially the same as, or identical to, SEQ ID NO: 1048, defined according to IMGT, for example SEQ ID NO: 1047. In some embodiments, the isolated polynucleotides encode an antibody or antigen-binding fragment thereof having a heavy chain CDR1 substantially the same as, or identical to, SEQ ID NO: 912, defined according to IMGT, for example SEQ ID NO: 911. In some embodiments, the isolated polynucleotides encode an antibody or antigen-binding fragment thereof having a heavy chain CDR2 substantially the same as, or identical to, SEQ ID NO: 914, defined according to IMGT, for example SEQ ID NO: 913. In some embodiments, the isolated polynucleotides encode an antibody or antigen-binding fragment thereof having a heavy chain CDR3 substantially the same as, or identical to, SEQ ID NO: 916, defined according to IMGT, for example SEQ ID NO: 915. The isolated polynucleotides may encode an antibody or antigen-binding fragment thereof having a light chain with a CDR1 substantially the same as, or identical to, SEQ ID NO: 1044, for example SEQ ID NO: 1043; a CDR2 substantially the same as, or identical to, SEQ ID NO: 1046, for example SEQ ID NO: 1045; and a CDR3 substantially the same as, or identical to, SEQ ID NO: 1048, for example SEQ ID NO: 1047, defined according to IMGT. The isolated polynucleotides may encode an antibody or antigen-binding fragment thereof having a heavy chain CDR1 substantially the same as, or identical to, SEQ ID NO: 912, for example SEQ ID NO: 911; a CDR2 substantially the same as, or identical to, SEQ ID NO: 914, for example SEQ ID NO: 913; and a CDR3 substantially the same as, or identical to, SEQ ID NO: 916, for example SEQ ID NO: 915, defined according to IMGT. The isolated polynucleotides may encode an antibody or antigen-binding fragment thereof having a light chain CDR1 substantially the same as, or identical to, SEQ ID NO: 1044, for example SEQ ID NO: 1043; a CDR2 encoded by a nucleotide sequence substantially the same as, or identical to, SEQ ID NO: 1046, for example SEQ ID NO: 1045; and a CDR3 encoded by a nucleotide sequence substantially the same as, or identical to, SEQ ID NO: 1048, for example SEQ ID NO: 1047; and a heavy chain CDR1 substantially the same as, or identical to, SEQ ID NO: 912, for example SEQ ID NO: 911; a CDR2 substantially the same as, or identical to, SEQ ID NO: 914, for example SEQ ID NO: 913; and a CDR3 substantially the same as, or identical to, SEQ ID NO: 916, for example SEQ ID NO: 915, defined according to IMGT.

[0104] In some embodiments, the isolated polynucleotides encode an antibody or antigen-binding fragment thereof having a light chain CDR1 sequence substantially the same as, or identical to, SEQ ID NO: 846, defined according to Kabat, for example SEQ ID NO: 845. In some embodiments, the isolated polynucleotides encode an antibody or antigen-binding fragment thereof having a light chain CDR2 substantially the same as, or identical to, SEQ ID NO: 848, defined according to Kabat, for example SEQ ID NO: 847. In some embodiments, the isolated polynucleotides encode an antibody or antigen-binding fragment thereof having a light chain CDR3 substantially the same as, or identical to, SEQ ID NO: 850, defined according to Kabat, for example SEQ ID NO: 849. In some embodiments, the isolated polynucleotides encode an antibody or antigen-binding fragment thereof having a heavy chain CDR1 substantially the same as, or identical to, SEQ ID NO: 732, defined according to Kabat, for example SEQ ID NO: 731. In some embodiments, the isolated polynucleotides encode an antibody or antigen-binding fragment thereof having a heavy chain CDR2 substantially the same as, or identical to, SEQ ID NO: 734, defined according to Kabat, for example SEQ ID NO: 733. In some embodiments, the isolated polynucleotides encode an antibody or antigen-binding fragment thereof having a heavy chain CDR3 substantially the same as, or identical to, SEQ ID NO: 736, defined according to Kabat, for example SEQ ID NO: 735. The isolated polynucleotides may encode an antibody or antigen-binding fragment thereof having a light chain with a CDR1 substantially the same as, or identical to, SEQ ID NO:846, for example SEQ ID NO: 845; a CDR2 substantially the same as, or identical to, SEQ ID NO: 848, for example SEQ ID NO: 847; and a CDR3 substantially the same as, or identical to, SEQ ID NO: 850, for example SEQ ID NO: 849, defined according to Kabat. The isolated polynucleotides may encode an antibody or antigen-binding fragment thereof having a heavy chain CDR1 substantially the same as, or identical to, SEQ ID NO: 732, for example SEQ ID NO: 731; a CDR2 substantially the same as, or identical to, SEQ ID NO: 734, for example SEQ ID NO: 733; and a CDR3 substantially the same as, or identical to, SEQ ID NO: 736, for example SEQ ID NO: 735, defined according to Kabat. The isolated polynucleotides may encode an antibody or antigen-binding fragment thereof having a light chain CDR1 substantially the same as, or identical to, SEQ ID NO: 846, for example SEQ ID NO: 845; a CDR2 encoded by a nucleotide sequence substantially the same as, or identical to, SEQ ID NO: 848, for example SEQ ID NO: 847; and a CDR3 encoded by a nucleotide sequence substantially the same as, or identical to, SEQ ID NO: 850, for example SEQ ID NO: 849; and a heavy chain CDR1 substantially the same as, or identical to, SEQ ID NO: 732, for example SEQ ID NO: 731; a CDR2 substantially the same as, or identical to, SEQ ID NO: 734, for example SEQ ID NO: 733; and a CDR3 substantially the same as, or identical to, SEQ ID NO: 736, for example SEQ ID NO: 735, defined according to Kabat.

[0105] In some embodiments, the isolated polynucleotides encode an antibody or antigen-binding fragment thereof having a light chain CDR1 sequence substantially the same as, or identical to, SEQ ID NO: 1116, defined according to IMGT, for example SEQ ID NO: 1115. In some embodiments, the isolated polynucleotides encode an antibody or antigen-binding fragment thereof having a light chain CDR2 substantially the same as, or identical to, SEQ ID NO: 1118, defined according to IMGT, for example SEQ ID NO: 1117. In some embodiments, the isolated polynucleotides encode an antibody or antigen-binding fragment thereof having a light chain CDR3 substantially the same as, or identical to, SEQ ID NO: 1120, defined according to IMGT, for example SEQ ID NO: 1119. In some embodiments, the isolated polynucleotides encode an antibody or antigen-binding fragment thereof having a heavy chain CDR1 substantially the same as, or identical to, SEQ ID NO: 1002, defined according to IMGT, for example SEQ ID NO: 1001. In some embodiments, the isolated polynucleotides encode an antibody or antigen-binding fragment thereof having a heavy chain CDR2 substantially the same as, or identical to, SEQ ID NO: 1004, defined according to IMGT, for example SEQ ID NO: 1003. In some embodiments, the isolated polynucleotides encode an antibody or antigen-binding fragment thereof having a heavy chain CDR3 substantially the same as, or identical to, SEQ ID NO: 1006, defined according to IMGT, for example SEQ ID NO: 1005. The isolated polynucleotides may encode an antibody or antigen-binding fragment thereof having a light chain with a CDR1 substantially the same as, or identical to, SEQ ID NO: 1116, for example SEQ ID NO: 1115; a CDR2 substantially the same as, or identical to, SEQ ID NO: 1118, for example SEQ ID NO: 1117; and a CDR3 substantially the same as, or identical to, SEQ ID NO: 1120, for example SEQ ID NO: 1119, defined according to IMGT. The isolated polynucleotides may encode an antibody or antigen-binding fragment thereof having a heavy chain CDR1 substantially the same as, or identical to, SEQ ID NO: 1002, for example SEQ ID NO: 1001; a CDR2 substantially the same as, or identical to, SEQ ID NO: 1004, for example SEQ ID NO: 1003; and a CDR3 substantially the same as, or identical to, SEQ ID NO: 1006, for example SEQ ID NO: 1005, defined according to IMGT. The isolated polynucleotides may encode an antibody or antigen-binding fragment thereof having a light chain CDR1 substantially the same as, or identical to, SEQ ID NO: 1116, for example SEQ ID NO: 1115; a CDR2 encoded by a nucleotide sequence substantially the same as, or identical to, SEQ ID NO: 1118, for example SEQ ID NO: 1117; and a CDR3 encoded by a nucleotide sequence substantially the same as, or identical to, SEQ ID NO: 1120, for example SEQ ID NO: 1119; and a heavy chain CDR1 substantially the same as, or identical to, SEQ ID NO: 1002, for example SEQ ID NO: 1001; a CDR2 substantially the same as, or identical to, SEQ ID NO: 1004, for example SEQ ID NO: 1003; and a CDR3 substantially the same as, or identical to, SEQ ID NO: 1006, for example SEQ ID NO: 1005, defined according to IMGT.

[0106] Polynucleotides described herein may encode antibodies or antigen-binding fragments that have a light chain variable domain segment that includes an amino acid sequence substantially the same as, or identical to, SEQ ID NO: 411, for example SEQ ID NO: 410. In some embodiments the described isolated polynucleotides may encode antibodies or antigen-binding fragments that have a heavy chain variable domain segment that includes an amino acid sequence substantially the same as, or identical to, SEQ ID NO: 196, for example SEQ ID NO: 195. In some embodiments the described isolated polynucleotides may encode antibodies or antigen-binding fragments that have a light chain variable domain segment that includes an amino acid sequence substantially the same as, or identical to, SEQ ID NO: 411, for example SEQ ID NO: 410; and a heavy chain variable domain segment that includes an amino acid sequence substantially the same as, or identical to, SEQ ID NO: 196, for example SEQ ID NO: 195. The isolated polynucleotides capable of encoding the variable domain segments provided herein may be included on the same, or different, vectors to produce antibodies or antigen-binding fragments.

[0107] Polynucleotides described herein may encode antibodies or antigen-binding fragments that have a light chain variable domain segment that includes an amino acid sequence substantially the same as, or identical to, SEQ ID NO: 465, for example SEQ ID NO: 464. In some embodiments the described isolated polynucleotides may encode antibodies or antigen-binding fragments that have a heavy chain variable domain segment that includes an amino acid sequence substantially the same as, or identical to, SEQ ID NO: 268, for example SEQ ID NO: 267. In some embodiments the described isolated polynucleotides may encode antibodies or antigen-binding fragments that have a light chain variable domain segment that includes an amino acid sequence substantially the same as, or identical to, SEQ ID NO: 465, for example SEQ ID NO: 464; and a heavy chain variable domain segment that includes an amino acid sequence substantially the same as, or identical to, SEQ ID NO: 268, for example SEQ ID NO: 267. The isolated polynucleotides capable of encoding the variable domain segments provided herein may be included on the same, or different, vectors to produce antibodies or antigen-binding fragments.

[0108] Polynucleotides described herein may encode antibodies or antigen-binding fragments that have a light chain variable domain segment that includes an amino acid sequence substantially the same as, or identical to, SEQ ID NO: 581, for example SEQ ID NO: 580. In some embodiments the described isolated polynucleotides may encode antibodies or antigen-binding fragments that have a heavy chain variable domain segment that includes an amino acid sequence substantially the same as, or identical to, SEQ ID NO: 268, for example SEQ ID NO: 267. In some embodiments the described isolated polynucleotides may encode antibodies or antigen-binding fragments that have a light chain variable domain segment that includes an amino acid sequence substantially the same as, or identical to, SEQ ID NO: 581, for example SEQ ID NO: 580; and a heavy chain variable domain segment that includes an amino acid sequence substantially the same as, or identical to, SEQ ID NO: 268, for example SEQ ID NO: 267. The isolated polynucleotides capable of encoding the variable domain segments provided herein may be included on the same, or different, vectors to produce antibodies or antigen-binding fragments.

[0109] Polynucleotides described herein may encode antibodies or antigen-binding fragments that have a light chain variable domain segment that includes an amino acid sequence substantially the same as, or identical to, SEQ ID NO: 545, for example SEQ ID NO: 544. In some embodiments the described isolated polynucleotides may encode antibodies or antigen-binding fragments that have a heavy chain variable domain segment that includes an amino acid sequence substantially the same as, or identical to, SEQ ID NO: 384, for example SEQ ID NO: 383. In some embodiments the described isolated polynucleotides may encode antibodies or antigen-binding fragments that have a light chain variable domain segment that includes an amino acid sequence substantially the same as, or identical to, SEQ ID NO: 545, for example SEQ ID NO: 544; and a heavy chain variable domain segment that includes an amino acid sequence substantially the same as, or identical to, SEQ ID NO: 384, for example SEQ ID NO: 383. The isolated polynucleotides capable of encoding the variable domain segments provided herein may be included on the same, or different, vectors to produce antibodies or antigen-binding fragments.

[0110] Polynucleotides described herein may encode antibodies or antigen-binding fragments that have a light chain variable domain segment that includes an amino acid sequence substantially the same as, or identical to, SEQ ID NO: 545, for example SEQ ID NO: 544. In some embodiments the described isolated polynucleotides may encode antibodies or antigen-binding fragments that have a heavy chain variable domain segment that includes an amino acid sequence substantially the same as, or identical to, SEQ ID NO: 393, for example SEQ ID NO: 392. In some embodiments the described isolated polynucleotides may encode antibodies or antigen-binding fragments that have a light chain variable domain segment that includes an amino acid sequence substantially the same as, or identical to, SEQ ID NO: 545, for example SEQ ID NO: 544; and a heavy chain variable domain segment that includes an amino acid sequence substantially the same as, or identical to, SEQ ID NO: 393, for example SEQ ID NO: 392. The isolated polynucleotides capable of encoding the variable domain segments provided herein may be included on the same, or different, vectors to produce antibodies or antigen-binding fragments.

[0111] Polynucleotides described herein may encode antibodies or antigen-binding fragments that have a light chain variable domain segment that includes an amino acid sequence substantially the same as, or identical to, SEQ ID NO: 545, for example SEQ ID NO: 544. In some embodiments the described isolated polynucleotides may encode antibodies or antigen-binding fragments that have a heavy chain variable domain segment that includes an amino acid sequence substantially the same as, or identical to, SEQ ID NO: 402, for example SEQ ID NO: 401. In some embodiments the described isolated polynucleotides may encode antibodies or antigen-binding fragments that have a light chain variable domain segment that includes an amino acid sequence substantially the same as, or identical to, SEQ ID NO: 545, for example SEQ ID NO: 544; and a heavy chain variable domain segment that includes an amino acid sequence substantially the same as, or identical to, SEQ ID NO: 402, for example SEQ ID NO: 401. The isolated polynucleotides capable of encoding the variable domain segments provided herein may be included on the same, or different, vectors to produce antibodies or antigen-binding fragments.

[0112] Polynucleotides described herein may encode antibodies or antigen-binding fragments that have a light chain variable domain segment that includes an amino acid sequence substantially the same as, or identical to, SEQ ID NO: 572, for example SEQ ID NO:571. In some embodiments the described isolated polynucleotides may encode antibodies or antigen-binding fragments that have a heavy chain variable domain segment that includes an amino acid sequence substantially the same as, or identical to, SEQ ID NO: 384, for example SEQ ID NO: 383. In some embodiments the described isolated polynucleotides may encode antibodies or antigen-binding fragments that have a light chain variable domain segment that includes an amino acid sequence substantially the same as, or identical to, SEQ ID NO: 572, for example SEQ ID NO: 571; and a heavy chain variable domain segment that includes an amino acid sequence substantially the same as, or identical to, SEQ ID NO: 384, for example SEQ ID NO: 383. The isolated polynucleotides capable of encoding the variable domain segments provided herein may be included on the same, or different, vectors to produce antibodies or antigen-binding fragments.

[0113] Polynucleotides described herein may encode antibodies or antigen-binding fragments that have a light chain variable domain segment that includes an amino acid sequence substantially the same as, or identical to, SEQ ID NO: 572, for example SEQ ID NO: 571. In some embodiments the described isolated polynucleotides may encode antibodies or antigen-binding fragments that have a heavy chain variable domain segment that includes an amino acid sequence substantially the same as, or identical to, SEQ ID NO: 393, for example SEQ ID NO: 392. In some embodiments the described isolated polynucleotides may encode antibodies or antigen-binding fragments that have a light chain variable domain segment that includes an amino acid sequence substantially the same as, or identical to, SEQ ID NO: 572, for example SEQ ID NO: 571; and a heavy chain variable domain segment that includes an amino acid sequence substantially the same as, or identical to, SEQ ID NO: 393, for example SEQ ID NO: 392. The isolated polynucleotides capable of encoding the variable domain segments provided herein may be included on the same, or different, vectors to produce antibodies or antigen-binding fragments.

[0114] Polynucleotides described herein may encode antibodies or antigen-binding fragments that have a light chain variable domain segment that includes an amino acid sequence substantially the same as, or identical to, SEQ ID NO: 572, for example SEQ ID NO: 571. In some embodiments the described isolated polynucleotides may encode antibodies or antigen-binding fragments that have a heavy chain variable domain segment that includes an amino acid sequence substantially the same as, or identical to, SEQ ID NO: 402, for example SEQ ID NO: 401. In some embodiments the described isolated polynucleotides may encode antibodies or antigen-binding fragments that have a light chain variable domain segment that includes an amino acid sequence substantially the same as, or identical to, SEQ ID NO: 572, for example SEQ ID NO: 571; and a heavy chain variable domain segment that includes an amino acid sequence substantially the same as, or identical to, SEQ ID NO: 402, for example SEQ ID NO: 401. The isolated polynucleotides capable of encoding the variable domain segments provided herein may be included on the same, or different, vectors to produce antibodies or antigen-binding fragments.

[0115] The polynucleotides capable of encoding the variable domain segments provided herein may be included on the same, or different, vectors to produce antibodies or antigen-binding fragments. Polynucleotides encoding engineered antigen-binding proteins also are within the scope of the disclosure. In some embodiments, the polynucleotides described (and the peptides they encode) include a leader sequence. Any leader sequence known in the art may be employed. The leader sequence may include, but is not limited to, a restriction site or a translation start site.

[0116] Also provided are vectors comprising the polynucleotides described herein. The vectors can be expression vectors. Recombinant expression vectors containing a sequence encoding a polypeptide of interest are thus contemplated as within the scope of this disclosure. The expression vector may contain one or more additional sequences such as but not limited to regulatory sequences (e.g., promoter, enhancer), a selection marker, and a polyadenylation signal. Vectors for transforming a wide variety of host cells are well known and include, but are not limited to, plasmids, phagemids, cosmids, baculoviruses, bacmids, bacterial artificial chromosomes (BACs), yeast artificial chromosomes (YACs), as well as other bacterial, yeast and viral vectors.

[0117] Recombinant expression vectors within the scope of the description include synthetic, genomic, or cDNA-derived nucleic acid fragments that encode at least one recombinant protein which may be operably linked to suitable regulatory elements. Such regulatory elements may include a transcriptional promoter, sequences encoding suitable mRNA ribosomal binding sites, and sequences that control the termination of transcription and translation. Expression vectors, especially mammalian expression vectors, may also include one or more nontranscribed elements such as an origin of replication, a suitable promoter and enhancer linked to the gene to be expressed, other 5′ or 3′ flanking nontranscribed sequences, 5′ or 3′ nontranslated sequences (such as necessary ribosome binding sites), a polyadenylation site, splice donor and acceptor sites, or transcriptional termination sequences. An origin of replication that confers the ability to replicate in a host may also be incorporated.

[0118] The transcriptional and translational control sequences in expression vectors to be used in transforming vertebrate cells may be provided by viral sources. Exemplary vectors may be constructed as described by Okayama and Berg, 3 Mol. Cell. Biol. 280 (1983).

[0119] In some embodiments, the antibody- or antigen-binding fragment-coding sequence is placed under control of a powerful constitutive promoter, such as the promoters for the following genes: hypoxanthine phosphoribosyl transferase (HPRT), adenosine deaminase, pyruvate kinase, beta-actin, human myosin, human hemoglobin, human muscle creatine, and others. In addition, many viral promoters function constitutively in eukaryotic cells and are suitable for use with the described embodiments. Such viral promoters include without limitation, Cytomegalovirus (CMV) immediate early promoter, the early and late promoters of SV40, the Mouse Mammary Tumor Virus (MMTV) promoter, the long terminal repeats (LTRs) of Maloney leukemia virus, Human Immunodeficiency Virus (HIV), Epstein Barr Virus (EBV), Rous Sarcoma Virus (RSV), and other retroviruses, and the thymidine kinase promoter of Herpes Simplex Virus. In one embodiment, the antibody or antigen-binding fragment thereof coding sequence is placed under control of an inducible promoter such as the metallothionein promoter, tetracycline-inducible promoter, doxycycline-inducible promoter, promoters that contain one or more interferon-stimulated response elements (ISRE) such as protein kinase R 2′,5′-oligoadenylate synthetases, Mx genes, ADAR1, and the like.

[0120] Vectors described herein may contain one or more Internal Ribosome Entry Site(s) (IRES). Inclusion of an IRES sequence into fusion vectors may be beneficial for enhancing expression of some proteins. In some embodiments the vector system will include one or more polyadenylation sites (e.g., SV40), which may be upstream or downstream of any of the aforementioned nucleic acid sequences. Vector components may be contiguously linked, or arranged in a manner that provides optimal spacing for expressing the gene products (i.e., by the introduction of “spacer” nucleotides between the ORFs), or positioned in another way. Regulatory elements, such as the IRES motif, may also be arranged to provide optimal spacing for expression.

[0121] The vectors may comprise selection markers, which are well known in the art. Selection markers include positive and negative selection markers, for example, antibiotic resistance genes (e.g., neomycin resistance gene, a hygromycin resistance gene, a kanamycin resistance gene, a tetracycline resistance gene, a penicillin resistance gene), glutamate sythase genes, HSV-TK, HSV-TK derivatives for ganciclovir selection, or bacterial purine nucleoside phosphorylase gene for 6-methylpurine selection (Gadi et al., 7 Gene Ther. 1738-1743 (2000)). A nucleic acid sequence encoding a selection marker or the cloning site may be upstream or downstream of a nucleic acid sequence encoding a polypeptide of interest or cloning site.

[0122] The vectors described herein may be used to transform various cells with the genes encoding the described antibodies or antigen-binding fragments. For example, the vectors may be used to generate antibody or antigen-binding fragment-producing cells. Thus, another aspect features host cells transformed with vectors comprising a nucleic acid sequence encoding an antibody or antigen-binding fragment thereof that specifically binds Tau, such as the antibodies or antigen-binding fragments described and exemplified herein.

[0123] Numerous techniques are known in the art for the introduction of foreign genes into cells and may be used to construct the recombinant cells for purposes of carrying out the described methods, in accordance with the various embodiments described and exemplified herein. The technique used should provide for the stable transfer of the heterologous gene sequence to the host cell, such that the heterologous gene sequence is heritable and expressible by the cell progeny, and so that the necessary development and physiological functions of the recipient cells are not disrupted. Techniques which may be used include but are not limited to chromosome transfer (e.g., cell fusion, chromosome mediated gene transfer, micro cell mediated gene transfer), physical methods (e.g., transfection, spheroplast fusion, microinjection, electroporation, liposome carrier), viral vector transfer (e.g., recombinant DNA viruses, recombinant RNA viruses) and the like (described in Cline, 29 Pharmac. Ther. 69-92 (1985)). Calcium phosphate precipitation and polyethylene glycol (PEG)-induced fusion of bacterial protoplasts with mammalian cells may also be used to transform cells.

[0124] Cells suitable for use in the expression of the antibodies or antigen-binding fragments described herein are preferably eukaryotic cells, more preferably cells of plant, rodent, or human origin, for example but not limited to NS0, CHO, CHOK1, perC.6, Tk-ts13, BHK, HEK293 cells, COS-7, T98G, CV-1/EBNA, L cells, C127, 3T3, HeLa, NS1, and Sp2/0 myeloma cells cell lines, among others. In addition, expression of antibodies may be accomplished using hybridoma cells. Methods for producing hybridomas are well established in the art.

[0125] Cells transformed with expression vectors described herein may be selected or screened for recombinant expression of the antibodies or antigen-binding fragments described herein. Recombinant-positive cells are expanded and screened for subclones exhibiting a desired phenotype, such as high level expression, enhanced growth properties, or the ability to yield proteins with desired biochemical characteristics, for example, due to protein modification or altered post-translational modifications. These phenotypes may be due to inherent properties of a given subclone or to mutation. Mutations may be effected through the use of chemicals, UV-wavelength light, radiation, viruses, insertional mutagens, inhibition of DNA mismatch repair, or a combination of such methods.

[0126] In certain embodiments, an isolated cell line expressing any of the anti-Tau antibodies described herein are provided. In one embodiment, the isolated cell line is a hybridoma. In one embodiment, the isolated cell line is the hybridoma from which monoclonal antibody 7G6 is produced. In one embodiment, the isolated cell line is Freestyle® 293-F cells from which 7G6-HCzu8-LCzu6-HEK is produced and which cell line has been deposited with the American Type Culture Collection, Manassas, Va., USA, on Oct. 11, 2017, with the ATCC Patent Deposit Designation PTA-124523. In one embodiment, the isolated cell line is Freestyle® 293-F cells from which 7G6-HCzu25-LCzu18-HEK is produced and which cell line has been deposited with the American Type Culture Collection, Manassas, Va., USA, on Oct. 11, 2017, with the ATCC Patent Deposit Designation PTA-124524.

[0127] Cells that express the provided anti-Tau antibodies or antigen-binding fragments provided herein may be employed in methods of producing the anti-Tau antibodies or antigen-binding fragments by culturing the cells under conditions suitable for expression of the respective antibody or antigen-binding fragment. In some embodiments, the anti-Tau antibody or antigen-binding fragment is recovered from the culture medium.

[0128] In certain embodiments, any of the antibodies or antigen-binding fragments that specifically bind Tau as provided herein is useful for detecting the presence of Tau in a biological sample. The term “detecting” as used herein encompasses quantitative or qualitative detection. In certain embodiments, the biological sample may be derived from a cell or tissue, such as cerebrospinal fluid, a cell or tissue of the brain (e.g., cortex or hippocampus), or blood, a histological preparation, and the like. In some embodiments the described methods include detecting Tau in a sample by contacting the biological sample with:
[0129] (a) any one of antibody ms7G6, antibody 7G6-HCzu8-LCzu6, antibody 7G6-HCzu8-LCzu21, antibody 7G6-HCzu23-LCzu15, antibody 7G6-HCzu24-LCzu15, antibody 7G6-HCzu25-LCzu15, antibody 7G6-HCzu23-LCzu18, antibody 7G6-HCzu24-LCzu18, antibody 7G6-HCzu25-LCzu18, or an antigen-binding fragment thereof;
[0130] (b) an antibody, or antigen-binding fragment thereof, that comprises heavy chain CDR1, CDR2, and CDR3 amino acid sequences and light chain CDR1, CDR2, and CDR3 amino acid sequences of antibody ms7G6, antibody 7G6-HCzu8-LCzu6, or antibody 7G6-HCzu25-LCzu18, as described in Table 1;
[0131] (c) an antibody, or antigen-binding fragment thereof, that comprises the heavy chain variable domain segment and light chain variable domain segment of any one of antibody ms7G6, antibody 7G6-HCzu8/LCzu6, antibody 7G6-HCzu8/LCzu21, antibody 7G6-HCzu23/LCzu15, antibody 7G6-HCzu24/LCzu15, antibody 7G6-HCzu25/LCzu15, antibody 7G6-HCzu23/LCzu18, antibody 7G6-HCzu24/LCzu18, or antibody 7G6-HCzu25/LCzu18, as described in Table 1; or
[0132] (d) an antibody having the amino acid sequence of antibody produced by any one of the cell lines deposited with the ATCC having accession number PTA-124523 or PTA-124524, or an antigen binding fragment thereof.

[0133] In certain embodiments, the method comprises contacting the biological sample with an anti-Tau antibody as provided herein under conditions permissive for binding of the anti-Tau antibody to Tau, and detecting whether a complex is formed between the anti-Tau antibody and Tau. In some embodiments of these methods, the anti-Tau antibody is detectably labelled. The method may be an in vitro or in vivo method. The complex formed between the anti-Tau antibody and Tau in a test biological sample can be compared to the complex formed in a control biological sample (e.g., a biological sample from a healthy subject). The amount of the complex formed between the anti-Tau antibody and Tau in a test biological sample can also be quantified and compared to the amount of the complex formed in a control biological sample or to the average amount of the complex known to be formed in healthy subjects.

[0134] In a further aspect, the invention provides pharmaceutical formulations comprising any of the antibodies or antigen-binding fragments that specifically bind Tau as described herein, e.g., for use in any of the therapeutic methods provided herein. In some embodiments, a pharmaceutical formulation comprises any of the antibodies or antigen-binding fragments that specifically bind Tau provided herein and a pharmaceutically acceptable carrier.

[0135] Pharmaceutical formulations of an anti-Tau antibody or antigen-binding fragment as described herein are prepared by mixing such antibody or antigen-binding fragment having the desired degree of purity with one or more optional pharmaceutically acceptable carriers, diluents, and/or excipients (Remington's Pharmaceutical Sciences 16th edition, Osol, A. Ed. (1980)), in the form of lyophilized formulations or aqueous solutions. Pharmaceutically acceptable carriers, diluents, and excipients are generally nontoxic to recipients at the dosages and concentrations employed, and include, but are not limited to: sterile water, buffers such as phosphate, citrate, and other organic acids; antioxidants including ascorbic acid and methionine; preservatives (such as octadecyldimethylbenzyl ammonium chloride; hexamethonium chloride; benzalkonium chloride; benzethonium chloride; phenol, butyl or benzyl alcohol; alkyl parabens such as methyl or propyl paraben; catechol; resorcinol; cyclohexanol; 3-pentanol; and m-cresol); low molecular weight (less than about 10 residues) polypeptides; proteins, such as serum albumin, gelatin, or immunoglobulins; hydrophilic polymers such as polyvinylpyrrolidone; amino acids such as glycine, glutamine, asparagine, histidine, arginine, or lysine; monosaccharides, disaccharides, and other carbohydrates including glucose, mannose, or dextrins; chelating agents such as EDTA; sugars such as sucrose, mannitol, trehalose or sorbitol; salt-forming counter-ions such as sodium; metal complexes (e.g. Zn-protein complexes); and/or non-ionic surfactants such as polyethylene glycol (PEG). Exemplary pharmaceutically acceptable carriers herein further include interstitial drug dispersion agents such as soluble neutral-active hyaluronidase glycoproteins (sHASEGP), for example, human soluble PH-20 hyaluronidase glycoproteins, such as rHuPH20 (HYLENEX™, Baxter International, Inc.). Certain exemplary sHASEGPs and methods of use, including rHuPH20, are described in U.S. Pat. No. 7,871,607 and U.S. Publication No. 2006/0104968. In one aspect, a sHASEGP is combined with one or more additional glycosaminoglycanases such as chondroitinases.

[0136] Exemplary lyophilized antibody formulations are described in U.S. Pat. No. 6,267,958. Aqueous antibody formulations include those described in U.S. Pat. No. 6,171,586 and WO2006/044908, the latter formulations including a histidine-acetate buffer.

[0137] The anti-Tau antibody or antigen-binding fragment as an active ingredient in a pharmaceutical formulation may be entrapped in microcapsules prepared, for example, by coacervation techniques or by interfacial polymerization, for example, hydroxymethylcellulose or gelatin-microcapsules and poly-(methylmethacylate) microcapsules, respectively, in colloidal drug delivery systems (for example, liposomes, albumin microspheres, microemulsions, nano-particles and nanocapsules) or in macroemulsions. Such techniques are disclosed in Remington's Pharmaceutical Sciences 16th edition, Osol, A. Ed. (1980).

[0138] Sustained-release preparations may be prepared. Suitable examples of sustained-release preparations include semipermeable matrices of solid hydrophobic polymers containing the antibody, which matrices are in the form of shaped articles, e.g. films, or microcapsules.

[0139] The formulations to be used for in vivo administration are generally sterile. Sterility may be readily accomplished, e.g., by filtration through sterile filtration membranes.

[0140] Any of the antibodies or antigen-binding fragments that specifically bind Tau (or formulations thereof) provided herein may be used in therapeutic methods.

[0141] In one aspect, an anti-Tau antibody or antigen-binding fragment for use as a medicament is provided. In some embodiments, an anti-Tau antibody or antigen-binding fragment for use in the reduction of insoluble Tau is provided. In some embodiments, an anti-Tau antibody or antigen-binding fragment for use in inhibiting Tau aggregation is provided. In further aspects, an anti-Tau antibody or antigen-binding fragment for use in treating a Tauopathy is provided. Exemplary Tauopathies that can be treated with the disclosed anti-Tau antibodies or antigen-binding fragments include Alzheimer's disease (AD), progressive supranuclear palsy (PSP), and frontotemporal dementia (FTD). An exemplary FTD that can be treated is Pick's disease (PiD).

[0142] In certain embodiments, an anti-Tau antibody or antigen-binding fragment for use in a method of treatment is provided. In some embodiments, an anti-Tau antibody or antigen-binding fragment for use in a method of reducing insoluble Tau in a subject is provided. In some embodiments, an anti-Tau antibody or antigen-binding fragment for use in a method of inhibiting Tau aggregation in a subject is provided. In certain embodiments, an anti-Tau antibody or antigen-binding fragment for use in a method of treating a subject having a Tauopathy is provided. The method of treatment of a Tauopathy comprises administering to the subject the anti-Tau antibody or antigen-binding fragment in an amount effective to treat the Tauopathy. In certain embodiments, the Tauopathy is any one of the Tauopathies described above. In preferred embodiments, the subject is a mammal, preferably a human.

[0143] In a further aspect, also provided herein is the use of an anti-Tau antibody or antigen-binding fragment as described herein in the manufacture or preparation of a medicament. In some embodiments, the medicament is for reduction of insoluble Tau. In some embodiments, the medicament is for inhibition of Tau aggregation. In some embodiments, the medicament is for treatment of a Tauopathy. In certain embodiments, the Tauopathy is any one of the Tauopathies described above.

[0144] An anti-Tau antibody or antigen-binding fragment as described herein can be administered by any suitable means, including parenteral, intrapulmonary, and intranasal, and, if desired for local treatment, intralesional administration. Parenteral infusions include intramuscular, intravenous, intraarterial, intraperitoneal, or subcutaneous administration. Dosing can be by any suitable route, e.g. by injections, such as intravenous or subcutaneous injections, depending in part on whether the administration is brief or chronic. Various dosing schedules including but not limited to single or multiple administrations over various time-points, bolus administration, and pulse infusion are contemplated herein.

[0145] The anti-Tau antibodies or antigen-binding fragments provided herein are to be formulated, dosed, and administered in a fashion consistent with good medical practice. Factors for consideration in this context include the particular disorder being treated, the particular mammal being treated, the clinical condition of the individual patient, the cause of the disorder, the site of delivery of the agent, the method of administration, the scheduling of administration, and other factors known to medical practitioners.

[0146] For the prevention or treatment of disease, the appropriate dosage of the anti-Tau antibody or antigen-binding fragment will depend on the type of disease to be treated, the type of antibody, the severity and course of the disease, whether the antibody or antigen-binding fragment is administered for preventive or therapeutic purposes, previous therapy, the patient's clinical history and response to the antibody, and the discretion of the attending physician. The antibody or antigen-binding fragment is suitably administered to the patient at one time or over a series of treatments. Depending on the type and severity of the disease, about 1 μg/kg to 15 mg/kg of antibody or antigen-binding fragment can be an initial candidate dosage for administration to the patient, whether, for example, by one or more separate administrations, or by continuous infusion. One typical daily dosage might range from about 1 μg/kg to 100 mg/kg or more, depending on the factors mentioned above. For repeated administrations over several days or longer, depending on the condition, the treatment would generally be sustained until a desired suppression of disease symptoms occurs. One exemplary dosage of the antibody or antigen-binding fragment would be in the range from about 0.05 mg/kg to about 100 mg/kg. Thus, one or more doses of about 0.5 mg/kg, 2.0 mg/kg, 10 mg/kg, 30 mg/kg, or 100 mg/kg (or any combination thereof) may be administered to the patient. Such doses may be administered intermittently, for example, every week or every three weeks (e.g. such that the patient receives from about two to about twenty, or e.g. about six doses of the antibody). An initial higher loading dose, followed by one or more lower doses may be administered. However, other dosage regimens may be useful. The progress of this therapy may be monitored by conventional techniques and assays.

[0147] Also provided herein is an article of manufacture containing material(s) useful for the treatment, prevention and/or diagnosis of the disorders described above. The article of manufacture comprises a container and a label or package insert on or associated with the container. Suitable containers include, for example, bottles, vials, syringes, IV solution bags, etc. The containers may be formed from a variety of materials such as glass or plastic. The container holds a composition which is by itself or combined with another composition effective for treating, preventing and/or diagnosing the condition and may have a sterile access port (for example the container may be an intravenous solution bag or a vial having a stopper pierceable by a hypodermic injection needle). The active agent in the composition is an anti-Tau antibody or antigen-binding fragment as described herein. The label or package insert indicates that the composition is used for treating the condition of choice. Alternatively, or additionally, the article of manufacture may further comprise a second container comprising a pharmaceutically-acceptable buffer, such as bacteriostatic water for injection (BWFI), phosphate-buffered saline, Ringer's solution and dextrose solution. It may further include other materials desirable from a commercial and user standpoint, including other buffers, diluents, filters, needles, and syringes.

### ILLUSTRATIVE EMBODIMENTS

[0148] Provided here are illustrative embodiments of the disclosed technology. These embodiments are illustrative only and do not limit the scope of the present disclosure or of the claims attached hereto.

[0149] Embodiment 1. A monoclonal antibody, or an antigen-binding fragment thereof, that specifically binds a human Tau, the antibody comprising:
[0150] a heavy chain complementarity determining region 1 (HCDR1), a heavy chain complementarity determining region 2 (HCDR2), and a heavy chain complementarity determining region 3 (HCDR3) as set forth in SEQ ID NO: 196 and a light chain complementarity determining region 1 (LCDR1), a light chain complementarity determining region 2 (LCDR2), and a light chain complementarity determining region 3 (LCDR3) as set forth in SEQ ID NO: 411;
[0151] a HCDR1, a HCDR2, and a HCDR3 as set forth in SEQ ID NO: 268 and a LCDR1, a LCDR2, and a LCDR3 as set forth in SEQ ID NO: 465; or
[0152] a HCDR1, a HCDR2, and a HCDR3 as set forth in SEQ ID NO: 402 and a LCDR1, a LCDR2, and a LCDR3 as set forth in SEQ ID NO: 572.

[0153] Embodiment 2. The monoclonal antibody or antigen-binding fragment according to Embodiment 1, wherein:
[0154] the HCDR1 comprises SEQ ID NO: 594, the HCDR2 comprises SEQ ID NO: 596, the HCDR3 comprises SEQ ID NO: 598, the LCDR1 comprises SEQ ID NO: 738, the LCDR2 comprises SEQ ID NO: 740, and the LCDR3 comprises SEQ ID NO: 742 as defined according to the method of Kabat;
[0155] the HCDR1 comprises SEQ ID NO: 864, the HCDR2 comprises SEQ ID NO: 866, the HCDR3 comprises SEQ ID NO: 868, the LCDR1 comprises SEQ ID NO: 1008, the LCDR2 comprises SEQ ID NO: 1010, and the LCDR3 comprises SEQ ID NO: 1012 as defined by IMGT;
[0156] the HCDR1 comprises SEQ ID NO: 642, the HCDR2 comprises SEQ ID NO: 644, the HCDR3 comprises SEQ ID NO: 646, the LCDR1 comprises SEQ ID NO: 774, the LCDR2 comprises SEQ ID NO: 776, and the LCDR3 comprises SEQ ID NO: 778 as defined according to the method of Kabat;
[0157] the HCDR1 comprises SEQ ID NO: 912, the HCDR2 comprises SEQ ID NO: 914, the HCDR3 comprises SEQ ID NO: 916, the LCDR1 comprises SEQ ID NO: 1044, the LCDR2 comprises SEQ ID NO: 1046, and the LCDR3 comprises SEQ ID NO: 1048 as defined by IMGT;
[0158] the HCDR1 comprises SEQ ID NO: 732, the HCDR2 comprises SEQ ID NO: 734, the HCDR3 comprises SEQ ID NO: 736, the LCDR1 comprises SEQ ID NO: 846, the LCDR2 comprises SEQ ID NO: 848, and the LCDR3 comprises SEQ ID NO: 850 as defined according to the method of Kabat; or
[0159] the HCDR1 comprises SEQ ID NO: 1002, the HCDR2 comprises SEQ ID NO: 1004, the HCDR3 comprises SEQ ID NO: 1006, the LCDR1 comprises SEQ ID NO: 1116, the LCDR2 comprises SEQ ID NO: 1118, and the LCDR3 comprises SEQ ID NO: 1120 as defined by IMGT.

[0160] Embodiment 3. The monoclonal antibody or antigen-binding fragment according to Embodiment 1 or 2, wherein the residue at position 49 of the light chain according to the method of Kabat is not cysteine.

[0161] Embodiment 4. The monoclonal antibody or antigen-binding fragment according to Embodiment 3, wherein the residue at position 49 of the light chain according to the method of Kabat is serine.

[0162] Embodiment 5. The monoclonal antibody or antigen-binding fragment according to any preceding Embodiment wherein the residue at position 57 of the heavy chain according to the method of Kabat is not cysteine.

[0163] Embodiment 6. The monoclonal antibody or antigen-binding fragment according to Embodiment 5, wherein the residue at position 57 of the heavy chain according to the method of Kabat is serine.

[0164] Embodiment 7. The monoclonal antibody or antigen-binding fragment according to any preceding Embodiment wherein the residue at position 34 of the light chain according to the method of Kabat is glutamate.

[0165] Embodiment 8. The monoclonal antibody or antigen-binding fragment according to any preceding Embodiment wherein the residue at position 36 of the light chain according to the method of Kabat is not phenylalanine.

[0166] Embodiment 9. The monoclonal antibody or antigen-binding fragment according to Embodiment 8 wherein the residue at position 36 of the light chain according to the method of Kabat is tyrosine.

[0167] Embodiment 10. The monoclonal antibody or antigen-binding fragment according to any preceding Embodiment wherein the residue at position 46 of the light chain according to the method of Kabat is not arginine.

[0168] Embodiment 11. The monoclonal antibody or antigen-binding fragment according to Embodiment 10 wherein the residue at position 46 of the light chain according to the method of Kabat is leucine.

[0169] Embodiment 12. The monoclonal antibody or antigen-binding fragment according to any preceding Embodiment wherein the residue at position 94 of the heavy chain according to the method of Kabat is not lysine.

[0170] Embodiment 13. The monoclonal antibody or antigen-binding fragment according to any preceding Embodiment wherein the residue at position 71 of the heavy chain according to the method of Kabat is not arginine.

[0171] Embodiment 14. The monoclonal antibody or antigen-binding fragment according to the method of Embodiment 13 wherein position 71 of the heavy chain according to the Kabat method is valine.

[0172] Embodiment 15. The monoclonal antibody or antigen-binding fragment according to Embodiment 1 or Embodiment 2, the antibody comprising:
[0173] a heavy chain variable domain (HCVD) comprising SEQ ID NO: 268 and a light chain variable domain (LCVD) comprising SEQ ID NO: 465;
[0174] a HCVD comprising SEQ ID NO: 268 and a LCVD comprising SEQ ID NO: 581;
[0175] a HCVD comprising SEQ ID NO: 384 and a LCVD comprising SEQ ID NO: 545;
[0176] a HCVD comprising SEQ ID NO: 393 and a LCVD comprising SEQ ID NO: 545;
[0177] a HCVD comprising SEQ ID NO: 402 and a LCVD comprising SEQ ID NO: 545;
[0178] a HCVD comprising SEQ ID NO: 384 and a LCVD comprising SEQ ID NO: 572;
[0179] a HCVD comprising SEQ ID NO: 393 and a LCVD comprising SEQ ID NO: 572; or a HCVD comprising SEQ ID NO: 402 and a LCVD comprising SEQ ID NO: 572.

[0180] Embodiment 16. The monoclonal antibody or antigen-binding fragment according to any preceding Embodiment, wherein the antibody is produced by the cell line having ATCC deposit number PTA-124523.

[0181] Embodiment 17. The monoclonal antibody or antigen-binding fragment according to any one of Embodiments 1 to 15, wherein the antibody is produced by the cell line having ATCC deposit number PTA-124524.

[0182] Embodiment 18. The monoclonal antibody or antigen-binding fragment according to any preceding Embodiment, wherein the antibody is a murine antibody, a chimeric antibody, or a humanized antibody.

[0183] Embodiment 19. The monoclonal antibody or antigen-binding fragment according to any preceding Embodiment wherein the antibody is IgG1.

[0184] Embodiment 20. The monoclonal antibody or antigen-binding fragment according to any preceding Embodiment wherein the antibody binds monomeric wild-type human 2N4R Tau with a K_{D} of less than about 0.5 nM as measured by surface plasmon resonance.

[0185] Embodiment 21. The monoclonal antibody or antigen-binding fragment according to any preceding Embodiment, wherein the antibody or antigen-binding fragment binds to human Tau at an epitope comprising the amino acid sequence HVPG (SEQ ID NO: 1133).

[0186] Embodiment 22. The monoclonal antibody or antigen-binding fragment according to Embodiment 21, wherein the antibody or antigen-binding fragment is biepitopic and binds to human Tau at an epitope comprising the amino acid sequence HVPG (SEQ ID NO: 1133) within repeat region 2 or repeat region 4.

[0187] Embodiment 23. The monoclonal antibody or antigen-binding fragment according to any one of Embodiments 1 to 20, wherein the antibody or antigen-binding fragment binds to human Tau at an epitope comprising the amino acid sequence HVPGG (SEQ ID NO: 79).

[0188] Embodiment 24. The monoclonal antibody or antigen-binding fragment according to Embodiment 23, wherein the antibody or antigen-binding fragment is biepitopic and binds to human Tau at an epitope comprising the amino acid sequence HVPGG (SEQ ID NO: 79) within repeat region 2 or repeat region 4.

[0189] Embodiment 25. The monoclonal antibody or antigen-binding fragment according to any preceding Embodiment,
[0190] wherein the antibody or antigen-binding fragment binds human Tau at the epitope comprising the amino acid sequence HVPGG (SEQ ID NO: 79) within repeat region 2 with a binding preference that is at least about 10-fold greater than binding at an epitope comprising the amino acid sequence HKPGG (SEQ ID NO: 182) within repeat region 3 or than binding at an epitope comprising the amino acid sequence HQPGG (SEQ ID NO: 183) within repeat region 1, or
[0191] wherein the antibody or antigen-binding fragment binds human Tau at the epitope comprising the amino acid sequence HVPGG (SEQ ID NO: 79) within repeat region 4 with a binding preference that is at least about 10-fold greater than binding at an epitope comprising the amino acid sequence HKPGG (SEQ ID NO: 182) within repeat region 3 or than binding at an epitope comprising the amino acid sequence HQPGG (SEQ ID NO: 183) within repeat region 1,
   as determined by a peptide binding assay.

[0192] Embodiment 26. The monoclonal antibody or antigen-binding fragment according to any preceding Embodiment wherein the antibody or antigen-binding fragment does not bind Tau at an epitope comprising the amino acid sequence HVSGG (SEQ ID NO: 184) within repeat region 2 or at an epitope comprising the amino acid sequence HVLGG (SEQ ID NO: 185) within repeat region 2.

[0193] Embodiment 27. A labeled antibody or antigen-binding fragment comprising the antibody or antigen-binding fragment according to any preceding Embodiment.

[0194] Embodiment 28. A nucleic acid molecule encoding the monoclonal antibody or antigen-binding fragment of any one of Embodiments 1 to 26.

[0195] Embodiment 29. A vector comprising the nucleic acid molecule of Embodiment 28.

[0196] Embodiment 30. A cell that expresses the nucleic acid molecule of Embodiment 28.

[0197] Embodiment 31. A method of producing an anti-Tau antibody or antigen-binding fragment comprising culturing a cell according to Embodiment 30 under conditions suitable for producing the antibody or antigen-binding fragment.

[0198] Embodiment 32. The method according to Embodiment 31 further comprising recovering the antibody or antigen-binding fragment.

[0199] Embodiment 33. A pharmaceutical composition comprising the antibody or antigen-binding fragment of any one of Embodiments 1 to 26 and a pharmaceutically acceptable carrier.

[0200] Embodiment 34. The antibody or antigen-binding fragment according to any one of Embodiments 1 to 26 for use as a medicament.

[0201] Embodiment 35. The antibody or antigen-binding fragment according to any one of Embodiments 1 to 26 for use in the treatment of a Tauopathy.

[0202] Embodiment 36. The antibody or antigen-binding fragment according to any one of Embodiments 1 to 26 for use in the preparation of a medicament for the treatment of a Tauopathy.

[0203] Embodiment 37. The antibody for use in accordance with Embodiment 35 or 36 wherein the Tauopathy is Alzheimer's disease, frontotemporal dementia, or progressive supranuclear palsy.

[0204] Embodiment 38. The antibody for use in accordance with Embodiment 37 wherein the frontotemporal dementia is Pick's Disease.

[0205] Embodiment 39. A method for decreasing sarkosyl-insoluble Tau levels, the method comprising administering to the subject the monoclonal antibody or antigen-binding fragment of any one of Embodiments 1 to 26.

[0206] Embodiment 40. A method for inhibiting Tau aggregation, the method comprising administering to the subject the monoclonal antibody or antigen-binding fragment of any one of Embodiments 1 to 26.

[0207] Embodiment 41. The method according to Embodiment 39 or 40 wherein the method is performed in vitro or in vivo.

[0208] Embodiment 42. A method of treating a Tauopathy in a subject, the method comprising: administering to the subject the monoclonal antibody or antigen-binding fragment of any one of Embodiments 1 to 26 under conditions effective to treat the Tauopathy in the subject.

[0209] Embodiment 43. The method according to Embodiment 42, wherein the Tauopathy is Alzheimer's disease, frontotemporal dementia, or progressive supranuclear palsy.

[0210] Embodiment 44. The method according to Embodiment 43, wherein the frontotemporal dementia is Pick's disease.

[0211] The following examples are provided to supplement the prior disclosure and to provide a better understanding of the subject matter described herein. These examples should not be considered to limit the described subject matter. It is understood that the examples and embodiments described herein are for illustrative purposes only and that various modifications or changes in light thereof will be apparent to persons skilled in the art and are to be included within the scope of the invention and can be made without departing from the true scope of the invention.

### Example 1: Generation of Monoclonal Antibodies

[0212] To generate anti-Tau antibodies recognizing the microtubule binding region (MTBR) of Tau, the peptide sequence CNIKHVPGGGSVQIVYKPVD (SEQ ID NO: 186) (Peptide antigen) was synthesized. Residues 2-20 of SEQ ID NO: 186 correspond to the amino acid sequence that spans the juncture between the second (i.e. not present in the 3R isoform) and third repeat regions of Tau (FIG. 2). The sequence also includes the hexapeptide motif known as PHF6 (VQIVYK) (SEQ ID NO: 187) (von Bergen et al., PNAS, 2000, 97(10): 5129-5134), which is one of the sites that initiates the aggregation of Tau. Peptide antigen was coupled to the Keyhole Limpet Hemocyannin (KLH) carrier protein via the N-terminal cysteine residue that does not naturally occur in the full length Tau-441 human protein sequence. The final immunogen was prepared by mixing the Peptide antigen-conjugated KLH with Freund's complete adjuvant (1:2 (v/v)). Tau knockout mice (Jackson #007251) were immunized with mL per mouse of a 2.5 mg/mL immunogen solution. Approximately 3 weeks following the initial injection, the mice received a boost immunization with Peptide antigen-conjugated KLH without adjuvant at 0.05 mL per mouse at the same protein concentration as before.

[0213] One month after the boost immunization, antisera were collected from the mice and antibody titers assessed by ELISA to measure immunoreactivity against the original immunizing Tau peptide and both 2N4R and 1N3R recombinant Tau proteins. Briefly, either 150 ng of Peptide antigen conjugated to BSA or 50 ng of 2N4R or 1N3R recombinant Tau protein (Enzo Life Sciences, cat. no's BML-SE321 and BML-SE323 respectively) were used to coat each well of a 96-well plate (Costar cat. no. 2797) in 10 mM phosphate buffer, pH 7.0 at 37° C. for 1 hour. Plates were blocked in a final concentration of 1% BSA diluted in PBS at room temperature for 30 minutes. Blocking solution was removed and various dilutions of anti-sera in the same blocking buffer were added to the plate for 1 hour at room temperature. The plate was washed several times with PBS prior to the addition of an HRP-labelled anti-mouse IgG antibody for 30 minutes at room temperature. Following additional wash steps, antibody binding was detected by addition of 3,3′,5,5′-Tetramethylbenzidine (TMB) substrate. The enzymatic reaction was stopped with an equal volume of 2M H₂SO₄ and the well optical density was determined using a platereader at wavelength 450 nm.

[0214] Once mice with a high antibody titer had been determined, cells were isolated from the medial iliac lymph nodes and fused using polyethylene glycol with mouse myeloma SP2 cells to generate hybridomas. Fused cells were seeded into 96-well plates and cultured in hypoxanthine-aminopterin-thymidine (HAT) selection medium. Culture supernatants were initially screened for Tau binding using the standard peptide and recombinant Tau ELISA assays as detailed in the previous paragraph. To give an approximation of relative binding, culture supernatant that was positive in the peptide ELISA and either recombinant protein, 2N4R or 1N3R, or both, were then evaluated in a competitive ELISA system. A 96-well plate was coated with 2N4R recombinant Tau, blocked and washed as before. At the primary antibody step, culture supernatant was diluted 1 in 10 and incubated with different dilutions of free antigen (2N4R Tau) for 1 hour at room temperature before addition to the plate. Once antibody/antigen complexes were added to the plate, the protocol for the remainder of the assay was identical to the standard ELISA procedure. Single cell clones were confirmed by serial dilution and microscopy. The resulting final hybridomas were cryopreserved in serum free medium.

Antibody Purification from Hybridomas

[0215] Hybridomas were grown in Hybridoma-SFM (Life Technologies) media containing 1% FBS, 1 ng/mL human IL-6 (R&D Systems) and Penicillin/Streptomycin. Cultures were scaled up to 100 mL and supernatant was harvested when cells reached a high density and were approximately 30% viable. Antibody was purified using Protein G columns, eluted with glycine/HCl, pH2.5 and immediately neutralized. Purified antibody was then dialyzed into 25 mM sodium phosphate (pH6.5) and 150 mM NaCl, aliquoted, and stored at −80° C.

[0216] Hybridoma clones generating antibodies that recognized the original immunization peptide and full length recombinant 2N4R Tau protein were produced (Table 2).

### Example 2: Affinity of Murine Antibodies to Recombinant Monomeric Tau Protein Expressed in E. coli

[0217] Kinetic analysis of the interaction of the anti-Tau mouse monoclonal antibodies generated in Example 1 with human wild type Tau (2N4R) and the equivalent P301S mutant Tau protein was conducted using a BIAcore™ T100 instrument. Recombinant human full length Tau proteins were expressed in E. coli and then purified by Cellufine™ phosphate affinity chromatography followed by ammonium sulfate precipitation and reverse phase HPLC chromatography.

[0218] Purified antibodies from hybridomas were captured by protein A/G immobilized on a CMS sensor chip (GE Healthcare). The wild type and P301S Tau proteins were then injected onto the sensor chip at five different concentrations and the affinity (equilibrium dissociation constant, K_{D}) was calculated according to the manufacturer's instruction. The results are shown in Table 2.

TABLE 2
Calculated affinity of seven anti-Tau mouse antibodies to
2N4R wild-type and P301S mutant recombinant Tau proteins.

| | | Wild type 2N4R | P301S-2N4R | Fold |
|---|---|---|---|---|
| Antibody | Isotype | Tau K_{D} (nM) | Tau K_{D} (nM) | difference |
| 6B2 | IgG1, k | 1.3 | 108 | 83.1 |
| 8E5 | IgG2b, k | 0.39 | 3.35 | 8.6 |
| 4E6 | IgG1, k | 1.0 | 33.5 | 33.5 |
| 5D1 | IgG1, k | 0.9 | 10.1 | 11.2 |
| 1F1 | IgG2a, k | 0.41 | 1.42 | 3.5 |
| 5H7 | IgG2a, k | 0.61 | 3.8 | 6.2 |
| 7G6 | IgG2b, k | 0.052 | 0.57 | 11.0 |

### Example 3: Fine Epitope Mapping of the ms7G6 Antibody

[0219] The recognition sequence of the murine 7G6 (“ms7G6” or “7G6”) antibody against the full length wild type 2N4R human Tau protein sequence (Tau441) was fine epitope-mapped using peptide chip microarrays.

[0220] All procedures were performed by PEPperPrint GmbH, Germany. The full length 2N4R wild type human Tau sequence was elongated with a neutral GSGSGSG linker sequence (SEQ ID NO: 188) at the C-terminus and translated into overlapping 15-mer peptides. The resulting peptide microarray containing 441 different peptides was printed in duplicate onto a glass chip along with 82 spots of an additional HA-tag control peptide (YPYDVPDYAG) (SEQ ID NO: 189).

[0221] The ms7G6 anti-Tau antibody was diluted to a concentration of 111 g/mL in PBS (pH 7.4) containing 0.05% Tween 20 and 10% Rockland blocking buffer (MB-070). The diluted antibody was incubated on the chip for 16 hours at 4° C. with shaking at 140 rpm. Primary antibody was removed and the chip was washed in PBS (pH 7.4)/0.05% Tween 20. Wash buffer was removed and goat anti-mouse IgG (H+L) DyLight™680 (1:5000) and an anti-HA tag DyLight™ 800 (1:2000) in the same buffer as the primary antibody was then incubated for 45 minutes at room temperature on the chip. Detection antibody was removed and the chip was washed once again as previously. Fluorescence images were acquired on the LI-COR Odyssey™ Imaging System and the microarray data was finally analyzed using the PepSlide™ Analyser software.

[0222] The fluorescent image of the chip (FIG. 3A) and resulting intensity plot (FIG. 3B) show that ms7G6 binds to two major sites on the full length Tau protein. It was also found that the minimum required sequence for ms7G6 binding at both sites is HVPGG (SEQ ID NO: 79) which is found at amino acid positions 299 to 303 (in the second repeat) and 362 to 366 (in the fourth repeat). Minor binding was observed at two additional sites: HQPGG (SEQ ID NO: 183) at amino acid positions 268 to 272, and HKPGG (SEQ ID NO: 182) at positions 330 to 334. Calculation of average signal intensities demonstrated that the mouse 7G6 antibody showed a 41-fold or 38-fold preference in binding to the HVPGG (SEQ ID NO: 79) site normally contained within the second repeat region of full length 4R Tau compared to the HQPGG (SEQ ID NO: 183) (repeat region 1) or HKPGG (SEQ ID NO: 182) (repeat region 3) sequences, respectively. Similarly, a 35-fold or 33-fold preference in binding to the HVPGG (SEQ ID NO: 79) site normally contained within the fourth repeat region of full length 4R Tau compared to the HQPGG (SEQ ID NO: 183) (repeat region 1) or HKPGG (SEQ ID NO: 182) (repeat region 3) sequences, respectively, was observed.

### Example 4: 7G6 Epitope Substitution Scanning

[0223] To determine the amino acid stringency of the epitope recognized by the ms7G6 antibody, substitution scanning of the naturally occurring Tau peptide sequence ‘KDNIKHVPGGGSVQI’ 5 (SEQ ID NO: 26) was performed. All procedures were undertaken by PEPperPrint GmbH, Germany and were based upon an exchange of all positions in the starting peptide with each of the 20 naturally-occurring amino acids.

[0224] Every possible 15-mer peptide was synthesized and printed in triplicate onto a glass chip to give a microarray containing 900 peptide spots. Additional copies of the wild type peptide as well as the HA-tag control peptide were also spotted onto the chip as controls. The peptide chip was then probed with ms7G6 under the same conditions as described in Example 3 (Fine epitope mapping of the ms7G6 antibody) and the resulting data analyzed using the PepSlide™ Analyser software (FIG. 4 illustrating results with SEQ ID NOs: 38 to 78). The substitution scanning showed that, within the peptide epitope of ¹HVPGG⁵ (SEQ ID NO: 79), antibody ms7G6 shows some flexibility in the second position with a number of possible residues. There is also some binding when the 5^{th} amino acid (glycine) is substituted to either an alanine or serine. The middle proline residue is needed for antibody binding and may not be substituted with any other naturally-occurring amino acid. This amino acid can correspond to the P301 residue (within amino acids 299 to 303 of Tau441, Uniprot accession number P10636-8) which is commonly mutated to a serine or leucine residue to mimic human Tauopathy in a number of preclinical in vitro and in vivo models. The substitution scanning data indicates that the ms7G6 antibody preferentially recognizes the amino acid sequence HVPGG (SEQ ID NO: 79) binding site at amino acids 362-366 in the mutant P301S protein.

### Example 5: In Vitro Tau Aggregation

[0225] To determine whether the ms7G6 antibody could functionally inhibit Tau aggregation in vitro, aggregation assays were performed with recombinant Tau protein.

[0226] Wild type or P301S mutant Tau protein was diluted to a concentration of 60 μM in buffer containing 25 mM HEPES (pH 7.4), 100 mM NaCl and 0.5 mM TCEP in a final volume of 20 μl. The mixture was heated in a thermal cycler at 98° C. for 30 minutes and then allowed to cool to room temperature. Mouse IgG2b control or ms7G6 antibodies were diluted to a final concentration of 8.3 μM in 25 mM HEPES (pH7.4), 100 mM NaCl and HALT Protease and Phosphatase inhibitors. Diluted antibodies or buffer controls were mixed with the Tau proteins and incubated at 37° C. for 30 minutes. To induce Tau aggregation, heparin was added to each reaction to a 12 μM final concentration in a final volume of 100 pI. The final reaction conditions were 12 μM Tau, 8.3 μM antibody, 0.1 mM TCEP and 12 μM Heparin in 25 mM HEPES pH7.4/100 mM NaCl buffer. The final reaction mixtures were incubated at 37° C. for at least 6 days with sampling throughout to measure Tau aggregation.

[0227] The aggregation of Tau was measured on days 0, 1, 2, 5 and 6 by removing 10 of the reaction mixture and placing into a 384-well, black-bottomed plate (Greiner). Thioflavin S dye was added to each well to a final concentration of 15 and the plate was incubated at room temperature in the dark for 30 minutes. Fluorescence was measured on a Pherastar™ platereader with excitation and emission wavelengths at 485 nm and 520 nm, respectively.

[0228] As shown in FIGS. 5A and 5B, the degree and rate of heparin-induced aggregation was higher for the P301S Tau protein compared to the wild type. The ms7G6 antibody substantially reduced the aggregation of both P301S Tau and wild-type Tau in vitro compared to IgG, as indicated by the lower amount of fluorescence generated. This suggests that, even for the P301S protein, ms7G6 binding to residues 362-366 alone could inhibit aggregation under these conditions.

### Example 6: In Vitro Cell Seeding Model

[0229] To determine whether ms7G6 or a humanized version known as 7G6-zuHC25-zuLC18 (see Example 10) had an effect on cells, each antibody was tested in an in vitro cell-based model of Tau seeding and aggregation.

[0230] The 2N4R isoform of human wild type Tau was expressed in E. coli and then purified as previously described (Soeda et al., Nat Commun. 2015, 6: 10216). Recombinant Tau (40 μM) was mixed with heparin (240 μg/mL) and incubated at 37° C. for 48 to 96 hours in 100 mM sodium acetate, pH 7.0, containing 2 mM DTT. Aggregated Tau protein was collected by ultracentrifugation and resuspended in 100 mM sodium acetate pH 7.0 or PBS. The solution was then sonicated to produce the recombinant Tau seeds.

[0231] Neuro-2a (ATCC) cells were transfected in suspension with cDNA expression plasmids encoding 0N4R P301S Tau using Lipofectamine LTX (Thermo Fisher Scientific) and plated at a density of 1.5×10 4 cells per well into a 96-well plate in DMEM medium containing 10% fetal bovine serum. Cells were left to attach overnight at 37° C. prior to adding Tau seeds. In parallel, various concentrations of anti-Tau antibodies were mixed with 1 μg/mL of Tau seed and were also incubated overnight at 37° C. The following day, culture medium was removed and medium containing the mixture of anti-Tau antibodies and seed were added. Plates were cultured again overnight at 37° C.

[0232] Cells were fixed with a final concentration of 4% paraformaldehyde and immunostained by H-150 (Santa Cruz Technology, sc-5587), thioflavin S (Sigma-Aldrich, T-1892) and DAPI (Wako, 340-07971). Images were captured and analysed using the InCell Analyzer 2200 and Toolbox.

[0233] As shown in FIGS. 6A, 6B, 6C, and 6D, a significant decrease in Thioflavin S staining (aggregated Tau) was observed in response to both ms7G6 and 7G6-HCzu25-LCzu18 treatment. This indicates that both antibodies were able to block the Tau seeding effect in this cell-based model under these assay conditions.

### Example 7: Efficacy in a Preclinical In Vivo Model of Tauopathy by Pre-Incubating Recombinant P301S Tau Seeds with Antibodies

[0234] The effects of three new antibodies, including ms7G6, were tested in a short term in vivo model of Tau deposition by pre-incubating the relevant antibodies with recombinant P301S Tau seeds. The seeds with or without antibody were then injected into the brains of P301S transgenic mice.

[0235] Intracerebroventricular (ICV) Injection of Tau Seeds

[0236] Pre-formed fibrillar (PFF) Tau was generated by mixing recombinant 2N4R P301S Tau (40 μM) and heparin (240 μg/mL), followed by an incubation step at 37° C. for 48 to 96 hours in 100 mM sodium acetate, pH7.0, containing 2 mM DTT. Aggregated Tau was collected by ultracentrifugation and resuspended in 100 mM sodium acetate, pH7.0. The resulting fibrils were sonicated and used as seeds for injection. Tau seeds at a concentration of mg/mL were incubated with 1 mg/mL IgG₁ or 2 mg/mL anti-Tau antibody for 1 hour at 37° C. The Tau seeds/antibody mixtures, controls (i.e., Tau alone) or vehicle was injected into the intracerebroventricular (ICV) zone of 2-3.5 months old P301S transgenic mice (MRC Technology, United Kingdom). These mice overexpress human 0N4R P301S Tau under the control of the murine neuron-specific Thy-1 promoter on a CBA×C57/b16 background.

[0237] It has been reported previously that these animals, if untreated, develop widespread Tau pathology in the brain and spinal cord with significant motor deficits at 5 to 6 months of age (Allen et al., J Neurosci. 2002, 22(21):9340-51). In the current experiment using younger P301S mice, animals were sacrificed two weeks after the ICV injection, brains were removed, and the tissue region of interest collected. Tissue samples were then fractionated into sarkosyl-soluble and insoluble Tau (Sahara et al., J Neurochem. 2002 December; 83(6):1498-508) as described below.

[0238] Extraction of Sarkosyl-Insoluble Tau from Seed-Injected P301S Mouse Brain

[0239] Tissue was homogenized in 19 volumes (tissue weight/volume) of extraction buffer containing 50 mM Tris-HCl (pH7.5) (Invitrogen), 5 mM EDTA (Nippon Gene), 1 mM EGTA (Nacalai Tesque), 1% NP-40 (Fluka), 0.25% deoxycholic acid sodium salt (Sigma Aldrich), 0.1 M NaCl, 0.5 mM PMSF (Sigma Aldrich), 1× PhosSTOP™ (Roche, Basel, Schweiz), and 1× Complete EDTA(−) (Roche). Homogenates were centrifuged at 163,000 g at 4° C. for 20 minutes and the resulting supernatants were collected and retained as the Tris buffer-soluble fraction. The pellet was resuspended in about 10 volumes (tissue weight/volume) of buffer containing 10 mM Tris-HCl (pH7.5), 0.5 M NaCl, 1 mM EGTA, 10% sucrose (Wako Pure Chemical), and 1% sarkosyl prior to sonication. Sarkosyl-treated samples were incubated at 37° C. for 60 minutes, and then centrifuged at 163,000 g at 4° C. for a further 20 minutes. The supernatants were collected as the sarkosyl-soluble fraction. Finally, about 10 volumes of PBS (Gibco) was added to the pellet which was then sonicated. This formed the sarkosyl-insoluble fraction.

[0240] Detection of Sarkosyl-Insoluble Tau by Western Blotting

[0241] Sarkosyl-insoluble fractions were solubilized in NuPAGE™ LDS sample buffer and NuPAGE™ sample reducing agent (Invitrogen), heated at 70° C. for 10 minutes, and separated using 12.5% polyacrylamide gels (DRC). Proteins were transferred to 0.2 μm PVDF membranes (Bio-Rad, Hercules, CA, USA) and blots were blocked in 2.5% skimmed milk (Yukikirushi) in TBS (Takara) containing 0.05% Tween (Nacalai tesque) for 1 hour at room temperature. After blocking, blots were probed with the human-specific monoclonal anti-Tau antibody HT7 (1:1000 or 1:2000, Thermo Fisher Scientific, Waltham, MA, USA) in blocking buffer for 1 hour at room temperature. The blots were washed in TB S-T for 30 minutes and then incubated with HRP-conjugated anti-mouse IgG (1:2000, GE healthcare) for a further 1 hour at room temperature. Secondary antibody was removed and blots were washed as described above. Tau proteins were detected by chemiluminescent horseradish peroxidase (HRP) substrate (Merck Millipore) and quantified using the Fusion FX (Vilber-Lourmat, France) analyzer. To determine the amount of Tau, serial dilutions of standards Tau derived from the originating sarkosyl-insoluble fraction of P301S spinal cord were loaded onto each gel.

[0242] As shown in FIG. 7, pre-incubation of P301S seeds with ms7G6 but not control IgG, 8E5 or 1F1 showed a significant decrease in sarkosyl-insoluble Tau levels compared with vehicle. This suggested that ms7G6 was a superior antibody in this paradigm compared to the other anti-Tau antibodies generated.

### Example 8: Validation of the P301S Seeding and Transmission In Vivo Model

[0243] To determine whether any transmission from one brain region to another of pathological Tau could occur in a rodent preclinical model, the same seeding experiment was performed in P301S transgenic mice as described in Example 7 but with some modifications. In this case, 20 μL of recombinant P301S Tau seeds at a concentration of 0.9 mg/mL was injected ICV into the brains of 2.5 to 3 month old mice. Mice were sacrificed at either 2, 4 or 6 weeks following the initial seed injection, brains were removed and both hippocampus and cortex were retained. The sarkosyl-insoluble Tau was prepared and detected as described above.

[0244] As shown in FIG. 8, a sharp increase in insoluble Tau levels was observed in the hippocampus between 2 and 4 weeks post seed-injection but only low levels of insoluble Tau was observed in the cortex at the same time point. However, between 4 and 6 weeks following seed injection a greater increase of insoluble Tau was observed in the cortex compared with the no-seed control group. This shows that, in this model, insoluble Tau can form in the hippocampus, prior to the cortex, suggestive of a secondary transmission event.

### Example 9: Effect of Peripheral Once Weekly Dosing of 7G6 in the P301S Seed Injection In Vivo Model

### a) Experiment 1

[0245] The P301S Tau seed injection into P301S transgenic mice was performed as described in Example 8 with minor modifications. About seven to about four hours prior to Tau seed injection, mice received a dose of either 40 mg/kg IgG2b control antibody (BioXCell) or ms7G6 antibody intraperitoneally. Each antibody was formulated in 25 mM phosphate buffer (pH6.5) with 150 mM NaCl. A vehicle treatment control group was also included which received buffer alone. Following Tau seed injection into the brain, mice received further doses of antibody or buffer once weekly for a period of 6 weeks. Animals were then sacrificed, brain tissues isolated, and insoluble Tau was prepared and measured as described in Example 7.

### b) Experiment 2

[0246] An exact repeat of Experiment 1 (Example 9a) was performed.

### c) Experiment 3

[0247] A repeat of Experiment 1 (Example 9a) was performed again except two dosing levels of ms7G6, 20 and 40 mg/kg, were administered and the animals were sacrificed 8 weeks after seed injection rather than 6 weeks as in the previous two experiments.

[0248] As shown in FIGS. 9 and 10, these three experiments demonstrate that ms7G6 can cause a reduction in insoluble Tau levels in this seed injection model with P301S recombinant Tau seeds in a P301S transgenic mouse. The reduction observed in the cortex suggests that the antibody may slow pathological Tau transmission. It was ascertained in example 4 that the ms7G6 antibody is unable to bind to the HVSGG sequence (SEQ ID NO: 184) (aa299-303) that is present in the P301S site of the mutant protein. Taken together, this means that the in vivo effects of ms7G6 in this in vivo model are driven by the binding to Tau at the remaining HVPGG (SEQ ID NO: 79) epitope within the fourth repeat region (aa362-366).

### Example 10: Antibody Humanization

### 10A. Materials & Methods

[0249] 10A.a. In Silico Modeling

[0250] Discovery Studio 4.5 was used to generate a molecular model of the ms7G6 Fv region. The top 1 to 3 crystal structures with the most homologous protein sequences to the ms7G6 variable heavy (VH) and variable kappa (VK) domains were used as a template for generating twenty-five homology models using the “Create Homology Models” function. The model with the lowest energy score was selected and the energy was first minimized for just the hydrogens and then for all atoms. Framework residues differing between the mouse sequences (HCzu1 and LCzu1) were highlighted and those closest to the CDRs or at the VH/VK interface were identified as residues that may be important for maintaining Tau binding by the CDRs or for antibody stability, respectively. CDR residues differing between the mouse sequences (HCzu1 and LCzu1) were highlighted and residues were identified that may be not important for maintaining Tau binding by the CDRs.

10A.b. Gene Synthesis and Cloning

[0251] 10A.b.1. InFusion™ Cloning

[0252] Humanized heavy and light variable domains were codon-optimized for expression in CHO cells and were synthesized by GeneArt. The variable domains were synthesized with a Kozak translation initiation sequence and an Ig secretion leader sequence and included 15 base-pairs at the 5′ and 3′ ends homologous to the cloning site within the subcloning vector. PCR fragments synthesized by GeneArt were subcloned into an expression plasmid containing a human gamma or kappa constant region using an InFusion™ HD cloning kit (Clontech). All clones were sequenced to confirm the presence and fidelity of the inserts.

[0253] 10A.b.2. QuikChange™

[0254] Point mutations were made using Stratagene's QuikChange™ XL according to the manufacturer's protocol. All clones were sequenced to confirm the presence of the mutation.

10A.c. Cell Culture

[0255] 10A.c.1. HEK Transient mAb Production

[0256] For each milliliter of 3×10⁶ cells to be transfected with ExpiFectamine™ (Thermo), 333.3 ng HC plasmid and 333.3 ng LC plasmid were incubated for 5-10 min in 50 μL Opti-MEM (Thermo). Likewise, 2.67 μL ExpiFectamine™ was incubated in 50 μL Opti-MEM. The ExpiFectamine™ solution was added to the DNA mixture and incubated for 20-30 min at room temperature. The DNA:ExpiFectamine™ mixture was added to the cells while swirling and incubated at 37° C., 8% CO₂, shaking at 125 rpm. The following day, 5 μL of enhancer 1 and 50 μL of enhancer 2 per mL of cells were added to the transfection with continued incubation for another 7-10 days. After 48-72 h, cells were fed at a final concentration of 10 g/L Yeastolate (BD Biosciences), 5 mM valeric acid (Sigma-Aldrich), and 1:100 CD Lipid Concentrate (Thermo).

[0257] 10A.c.2. CHO Transient mAb Production

[0258] For each milliliter of 6×10⁶ cells to be transfected with ExpiFectamine™ CHO (Thermo), 500 ng HC plasmid and 500 ng LC plasmid was mixed in Opti-PRO™ (Thermo) in μL total volume. Likewise, 3.2 μL ExpiFectamine™ CHO was mixed in 36.8 μL Opti-PRO. The ExpiFectamine™ CHO solution was added to the DNA mixture and incubated for 1-5 min at room temperature. The DNA:ExpiFectamine™ CHO mixture was added to the cells while swirling and incubated at 37° C., 8% CO₂, shaking at 125 rpm. The following day, 6 μL of enhancer and 160 μL of feed per mL of cells were added to the transfection, and cells were transferred to 32° C., 5% CO₂. At day 5, an additional 160 μL of feed per mL of cells was added. At day 12 to 14, the supernatants were harvested.

10A.d. MAb Purification

[0259] 10A.d.1. Batch Purification

[0260] Prosep™-vA High Capacity Protein A resin (Millipore) or CaptureSelect™ KappaSelect LC-kappa resin (Thermo) was equilibrated with DPBS, and 50 μL were added to 2 mL of sample. Following incubation at room temperature for 1 hour, the medium and resin were added to a filter plate and washed twice with 1 mL DPBS. The sample was eluted from the resin by addition of 400 μL 0.1 M Glycine, pH 2.9 followed by centrifugation at 15,000×g for 30 s. The sample was neutralized with 20 μL of 1 M Tris, pH 8.0. The samples were concentrated to 100 μL by centrifugation at 15,000×g for 5 minutes using 0.5 mL Amicon™ Ultra, 10 k cutoff filters (Millipore) and were buffer-exchanged into DPBS using 0.5 mL Zeba™ desalting columns, 7K MWCO, according to the manufacturer's protocol.

[0261] 10A.d.2. Column Purification

[0262] Purification was performed using an AKTA Xpress purification platform (GE Healthcare). Up to 1 L conditioned medium was loaded onto a 5 mL MabSelect™ SURE column (GE Healthcare) equilibrated in 20 mM sodium phosphate, 150 mM NaCl, pH 7.0. The column was washed extensively with equilibration buffer following loading until a stable baseline was observed. Bound material was eluted using 100 mM glycine, pH 2.9. Eluted material was immediately injected on to a 26/10 HiPrep desalting column (GE Healthcare) equilibrated in 1× phosphate-buffered saline (PBS) and eluted in the same buffer. Peak fractions were pooled. The material was analyzed for protein content by BCA assay (Thermo) and purity by reducing and non-reducing SDS-PAGE.

### 10A.e. 2N4R Tau-binding ELISA

[0263] A black Nunc MaxiSorp 96-well plate was coated with 2 μg/mL (unless otherwise indicated) of recombinant wild-type 2N4R Tau in DPBS overnight at 4° C. The following day the plate was aspirated and washed three times with Wash Buffer (PBS+0.05% Tween-20). The wells were incubated with Assay Buffer (1% w/v BSA [heat shock fraction, Sigma], 0.05% Tween-20 [BioRad], DPBS) for 1 h at room temperature. The Assay Buffer was aspirated and the wells were washed three times as above. Various concentrations of mAbs in DPBS were added to each well for 1 hour at room temperature while shaking on a microtiter plate shaker. Samples were aspirated and the wells were washed three times as above. HRP-conjugated goat anti-mouse IgG (H+L) (JIRL 115-035-146), gt anti-hu IgG (H+L) (JIRL 109-035-127), or Streptavidin-HRP (JIRL 016-030-084) was diluted 1:5000 in Assay Buffer and added to the wells. Following incubation and shaking at room temperature for 1 hour, samples were aspirated and the wells were washed three times as above. QuantaBlu (Thermo) was added to each well and incubated for 15 min at room temperature. The relative fluorescence units (RFU) were measured with the excitation and emission wavelengths set at 320 and 460 nm, respectively, using a Spectramax™ M5 plate reader (Molecular Devices).

10A.f. Surface Plasmon Resonance (SPR) Binding Analyses

[0264] 10A.f.1. Anti-Human/Anti-Mouse Capture Monomeric Tau-Binding Assay

[0265] 10A.f.1.i. Chip Preparation

[0266] All experiments were performed using a BIAcore™ T-100 instrument (GE Healthcare). 10 μL anti-human IgG (monoclonal mouse anti-human Fc) from human antibody capture kit (GE Healthcare) was diluted to 25 μL/mL in 200 μL final immobilization buffer (10 mM sodium acetate, pH 5.0). The flow rate was set to 5 flowpath 1. Fifty μL N-hydroxysuccinamide (NETS) and 50 μL 1-ethyl-3-(3-dimethylaminopropyl) carbidiimide (EDC) were mixed and injected for 420 sec to activate the CM5 chip surface. The diluted antibody was injected for 360 seconds followed by 1 M ethanolamine for 420 seconds. The flowpath was then switched to flowpath 2. A new EDC/NHS mixture was prepared and the procedure was repeated for flow cell 2. The surface was conditioned by 2 injections of 30 sec using flowpath 1,2 at 30 μL/min of 3M MgCl₂. For the anti-mouse surface, 10 μL anti-mouse IgG (polyclonal rabbit anti-mouse IgG) from mouse antibody capture kit (GE Healthcare) was diluted to 30 μL/mL in 324 μL final immobilization buffer (10 mM sodium acetate, pH 5.0). The flow rate was set to 5 μL/min, flowpath 3. Fifty μL NHS and 50 μL EDC were mixed and injected for 420 sec to activate the chip surface. The diluted antibody was injected for 420 sec. 1 M ethanolamine was injected for 420 sec. Flow path was switched to flowpath 4. A new EDC/NHS mixture was prepared and the procedure was repeated for flow cell 4. The surface was conditioned by 2 injections of 30 sec using flowpath 3,4 at 30 μL/min of 10 mM glycine, pH 1.7.
[0267] Final immobilization levels were:
[0268] Flow cell 1—10,000 RU (anti-human)
[0269] Flow cell 2—10,092 RU (anti-human)
[0270] Flow cell 3—11,824 RU (anti-mouse)
[0271] Flow cell 4—11,216 RU (anti-mouse)

[0272] 10A.f.1.ii. Binding Assay

[0273] The running buffer used for the binding assay was PBS-P+/0.2% BSA. All antibodies were diluted to 1 μg/mL in PBS-P+/0.2% BSA (same preparation as used for running buffer), centrifuged at 14,000 g for 5 min at room temperature, and the supernatant was transferred to a new tube. Analyte (Tau monomer 2N4R wt, 2.15 mg/mL, 47 μM) was diluted to 100 nM in PBS-P+/0.2% BSA, centrifuged at 14,000 g for 5 min at room temperature, and the supernatant transferred to a new tube. 100 nM solution was serially-diluted 5-fold into PBS-P+/0.2% BSA. Final concentrations were 100 nM, 20 nM, 4 nM, 0.8 nM, 0.16 nM, 0.032 nM, and 0 nM. Humanized antibodies were captured on flow cell 2 at a flow rate of 10 μL/min for a contact time of 60 sec. Murine antibodies were captured on flow cell 4 at a flow rate of 10 μL/min for a contact time of 60 sec. Dilutions of Tau protein were injected over all 4 flow cells at a flow rate of 30 μL/min for a contact time of 240 sec. Dissociation was followed for 900 sec. Following each cycle, surface was regenerated by a 30 sec injection (flowpath 1,2) at 30 μL/min of 3M MgCl₂, a 30 sec injection (flowpath 3,4) at 30 μL/min of 10 mM glycine, pH 1.7, a 30 sec injection (flowpath 1,2) at 30 μL/min of 3 M MgCl₂, followed by two 30-sec injections (flowpath 3,4) at 30 μL/min of 10 mM glycine, pH 1.7. After the run, data collected was fitted to a steady-state binding model using all concentrations using BIAEvaluations. Kinetic data fitting was performed using a 1:1 Langmuir model, excluding the 100 nM trace (inclusion of 100 nM trace resulted in unacceptably high X² values). A subset of antibody binding data was also analyzed using a 2-state model.

[0274] 10A.f.2. Anti-Human Capture Monomeric Tau-Binding Assay

[0275] 10A.f.2.i. Chip Preparation

[0276] Chip preparation was performed using a BIAcore™ T-100 instrument. Chip preparation was performed using the method wizard for immobilization. Running buffer was HBS-P+. Fifteen μL anti-human IgG (monoclonal mouse anti-human Fc) from human antibody capture kit (GE Healthcare) was diluted to 25 μL/mL in 300 μL final immobilization buffer (10 mM sodium acetate, pH 5.0). The flow rate was set to 5 μL/min. Immobilization was performed on all four flow cells with a ligand contact time of 360 sec. The surface was conditioned by two injections of 30 sec using flowpath 1,2, 3, 4 at 30 μL/min of 3 M MgCl₂.
[0277] Final immobilization levels were:
[0278] Flow cell 1—7341 RU
[0279] Flow cell 2—7683 RU
[0280] Flow cell 3—7530 RU
[0281] Flow cell 4—6303 RU

[0282] 10A.f.2.ii. Binding Assay

[0283] Binding experiments were performed using a BIOcore™ T-100 instrument or a T-200 instrument. Running buffer used for the binding assay was PBS-P+/0.2% BSA. All antibodies were diluted to 2 μg/mL in PBS-P+/0.2% BSA (the same preparation as used for the running buffer), centrifuged at 14,000 g for 5 min at room temperature, and the supernatant transferred to new tube. Analyte (Tau monomer 2N4R wt, 2.15 mg/mL, 47 μM) was diluted to 100 nM in PBS-P+/0.2% BSA, centrifuged at 14,000 g for 5 min at room temperature, and the supernatant transferred to a new tube. 100 nM solution was serially-diluted 5-fold into PBS-P+/0.2% BSA. Final concentrations were 100 nM, 20 nM, 4 nM, 0.8 nM, 0.16 nM, 0.032 nM, and 0 nM. Humanized antibodies were captured on flow cells 2, 3, and 4 sequentially at a flow rate of 10 μL/min for a contact time of 60 sec. Dilutions of Tau protein were injected over all 4 flow cells at a flow rate of 30 μL/min for a contact time of 240 sec. Dissociation was followed for 900 sec. Following each cycle, the surface was regenerated by two sequential injections of sec at 30 μL/min of 3 M MgCl₂ over all four flow cells. After the run, kinetic data fitting was performed using a 1:1 Langmuir model, excluding the 100 nM trace (inclusion of 100 nM trace resulted in unacceptably high X² values).

[0284] 10A.f.3. Streptavidin Capture Monomeric Tau-Binding Assay

[0285] 10A.f.3.i. Antibody Preparation

[0286] 400 μg of each antibody was diluted to 2 mg/mL and buffer-exchanged into 0.1 M sodium bicarbonate, pH 8.3 using 0.5 mL Zeba™ 40 kDa MWCO desalting columns (Thermo). NHS-PEG4-biotin, prepared immediately before use by dissolving in water to a 20 mM final stock concentration, was added to antibodies at a 5:1 molar ratio (biotin:MAb) and conjugated for 1 hr at room temperature. Excess biotin was removed by two sequential buffer exchanges into 1×DPBS using 0.5 mL Zeba™ 40 kDa MWCO desalting columns. For the BIAcore™ assay, antibodies were diluted to 2 μg/mL in PBS-P+/0.2% BSA (the same preparation used for the running buffer), centrifuged at 14,000 g for 5 min at room temperature, and the supernatant transferred to a new tube. Injection time was subsequently determined for each antibody to achieve a capture level of ˜225 RU.

[0287] Wild-type 2N4R Tau protein (2.15 mg/mL, 47 μM) was diluted to 100 nM in PBS-P+/0.2% BSA, centrifuged at 14,000 g for 5 min at room temperature, and supernatant transferred to a new tube. 20 nM solution was serially-diluted 5-fold into PBS-P+/0.2% BSA. Final concentrations were 20 nM, 4 nM, 0.8 nM, 0.16 nM, and 0 nM.

[0288] 10A.f.3.ii. Binding Assay

[0289] The biosensor chip used was a CAP chip from the biotin CAPture™ kit (GE Healthcare, cat 28-9202-34). All experiments were performed using a T-100 instrument. CAP reagent was immobilized on all four flow cells (flowpath 1, 2, 3, 4) at a flow rate of 2 μL/min for 5 min (final streptavidin level was ˜3500 RU). Biotinylated humanized antibodies, biotinylated chimeric 7G6, or biotinylated murine ms7G6 were captured on flow cells 2, 3, and 4 sequentially at a flow rate of 10 μL/min for a contact time of 80 sec to 146 sec (biotinylated chimeric antibody contact time was 240 sec). Dilutions of Tau protein were injected over all four flow cells at a flow rate of 30 μL/min for a contact time of 180 sec in sequence from 0 nM to 20 nM. Following the last injection (20 nM Tau), dissociation was followed for 900 sec. After each cycle, the surface was regenerated by one injection of 120 sec 10 μL/min of 6 M Guanidine HCl, M NaOH over all four flow cells. Samples were assayed in duplicate, except for murine 7G6 and 7G6-zuHC25-zuLC18, which were analyzed in duplicate on two separate flow cells (total of 4 analyses for each). After the run, kinetic data fitting was performed using a 1:1 Langmuir model using single cycle kinetics.

10A.g. Size Exclusion Chromatography-High Performance Liquid Chromatography (SEC-HPLC)

[0290] SEC-HPLC was performed on an Agilent 1260 quaternary pump HPLC system equipped with an AdvanceBio™ SEC 300A, 2.7 μm, 4.6 mm ID×50 mm guard column, and AdvanceBio™ SEC 300A, 2.7 μm, 4.6 mm ID×300 mm column (Agilent). The isocratic flow of a mobile phase consisting of 0.1 M sodium phosphate (pH 6.5) was at 0.35 mL/min. The separation was conducted at ambient temperature. The column effluent was monitored at 280 nm. Fifty μg of sample (10 μL of 5 mg/mL sample) was injected for each run; each sample was analyzed twice. Peak integration was performed using Agilent OpenLAB software. Retention time, peak height, peak area, peak width, and peak symmetry were reported. The percentage of aggregates and monomers were calculated based on the peak area.

10A.h. Differential Scanning Calorimetry (DSC) Analysis

[0291] VP Capillary Differential Scanning calorimeter (VP-CapDSC; MicroCal, VP-CapDSC, s/n 12-07-149 with Origin-7 graphing and MicroCal VP-Capillary DSC Software v.2.0) was used to decipher and compare the higher order structure and thermal stability of various F(ab′)₂ fragments and controls. Samples were allowed to acclimate to ambient temperature for 30 minutes, followed by vortexing. The entire sample (0.4-0.5 mL) was added to appropriate wells of an assay plate (Microliter Analytical Supply, 96 well, 500 μL, round well and bottom, cat #07-2100; Sun Suri plate cover cat #300-005). 0.5 mL of 20% Contrad solution and 0.5 mL water were added to the appropriate wells of the assay plate. Sealed plates were placed into an auto-sampler at 10° C.

[0292] The run was programmed and initiated using the following assay parameters:
[0293] DSC Controls:
[0294] Start Temperature=25° C.
[0295] Final Temperature=100° C.
[0296] Scan Rate=100° C./Hr
[0297] Number of Rescans=0
[0298] Rescan Cooling Rate=EXP
[0299] Pre-scan Thermostat=10 Minutes
[0300] Post-scan Thermostat=5 Minutes
[0301] Post-Cycle Thermostat=25° C.
[0302] Filtering Period=10 Seconds
[0303] Autofill Cells at =30° C.
[0304] Feedback Mode/Gain=None
[0305] Unique Scans
[0306] Sample Parameters:
[0307] Concentration=mM
[0308] File Parameters=Auto #
[0309] Rinse Station=select Wash 2 (So will Wash 2 (1×PBS) then Wash 1 (Water))
[0310] Thermostat Control Set Point=25° C.
[0311] Pulse Control:
[0312] Pulse Size=−3
[0313] Duration=600
[0314] Pulse Off
[0315] Y-Axis Scale Units=mCal/Minute
[0316] Clean in-line with Contrad/Contrad at 25-70° C., 100° C./Hour followed by two Buffer/Buffer injections.

### 10B. Results

[0317] 10B.a. IGHV1/IGKV2 Humanization

[0318] 10B.a.1. 7G6 in Silico Modelling

[0319] The human germline variable domain protein sequences most homologous to mouse ms7G6 mAb were retrieved using BLAST at www_ncbi_nlm_nih_gov/igblast/and www_imgt_org/3Dstructure-DB/cgi/DomainGapAlign_cgi. IGHV1-46*03 and IGKV2-30*02 variable domain families were the most homologous sequences to ms7G6 (FIG. 11). Mouse framework sequences were replaced with the closest homologous human germline sequences to generate CDR-grafted humanized variants.

[0320] The mouse and CDR-grafted sequences were used to generate in silico models of the variable domains. The theoretical structure of the mouse and humanized models were superimposed, and residues in close proximity to the CDRs were analyzed for potential structural influence on the overall structure of the CDR loops. While most of the differing residues were not located at the dimer interface or were distal to the CDRs, several residues were found to be in close proximity (within 5 Å) of the CDRs.

[0321] In the Vκ domain, the hydroxyl group in mouse Tyr36 formed a potential hydrogen bond with Trp100 in CDRH3. The human Phe36 loses this hydrogen bond, which may affect the structural integrity of CDRH3. Human Arg46 is much bulkier than the mouse Leu46, and Arg46 may sterically hinder proper folding of the CDRs. Similarly, in the Vh domain, position 71 was positioned against the CDRs. The human Arg71 may sterically hinder proper folding of the CDRs compared to the mouse Va171. The human Va178 was positioned similarly and is bulkier than the mouse Ala78. Therefore Va178 may, but was unlikely to, affect the integrity of the CDRs.

[0322] The mouse ms7G6 antibody contained two unpaired cysteines that may be problematic in the development of the mAb due to the presence of free thiols which could contribute to product aggregation, oxidation, cysteinylation, or glutathionylation. One Cys was located at position 57 in CDRH2 and the second was at position 49 in FWRL2.

[0323] The Kabat definition of CDRH2 extends 8 C-terminal amino acids longer than the IMGT definition. The latter 8 amino acids were analyzed for their proximity and potential contribution to antigen binding. Asn58 was within the potential antigen binding site at the potential CDR-antigen interface at the top of the variable domains. Residues 60, 61, 64, and 65 differing between mouse and the human germline sequence were outside of the potential antigen binding site and were not likely to directly contact the antigen or provide structural support for proper CDR folding.

### 10B.a.2. Humanized Vh1 and Vid Variants and Analysis for Tau Binding by ELISA

[0324] A series of humanized mutants were generated using the germline variable domain Vh1 and Vκ2 families to evaluate the importance of mouse residues at the positions predicted by in silico modeling to be important for CDR-antigen interactions (FIG. 12). Humanized and mouse 7G6 residues were analyzed at Vh positions 60, 61, 64, 65, 71, and 78 in various combinations (7G6-HCzu1-4), as well as the C57S mutation (7G6-HCzu5). Combinations of human and mouse residues at positions 36, 46, and 49 in ms7G6 Vκ were also analyzed (7G6-LCzu1-5) as well as the C49S mutation (7G6-LCzu6). MAbs were expressed in a matrix format whereby every combination of humanized HCs and LCs were cotransfected, except 7G6-HCzu5 was only coexpressed with 7G6-LCzu2 and 7G6-LCzu6 was only coexpressed with 7G6-HCzu3.

[0325] To test direct binding to Tau, 2N4R Tau was coated on 96-well plates and various concentrations of humanized mAbs were added to the wells. MAbs bound to Tau were detected with either an HRP-conjugated anti-mouse antibody (mouse [ms]7G6) or anti-human antibody (remaining samples). Samples were incubated for 1 h at room temperature in 96-well plates coated with 2N4R Tau. Following washing, HRP-conjugated anti-mouse or anti-human detection antibodies were added to the wells. The anti-mouse antibody was used to detect ms7G6. The amount of HRP activity in each well was measured by QuantaBlu fluorescent substrate and the RFUs were detected by a SpectraMax M5 plate reader.

[0326] Data from the samples, grouped according to the LC variant, except the cysteine mutants which are grouped on the bottom-most graph, is shown in FIGS. 13A-13F. Amongst all of the 7G6 HC and LC variants, there was little difference in Tau binding (FIGS. 13A-F; Table 3). Although ms7G6 showed better binding than the humanized variants, it should be noted that this result may be misleading due to the differing detection antibodies between the mouse and human samples. mAb2 corresponds to non-Tau-binding control IgG antibody.

TABLE 3
EC50s* of humanized 7G6
Vh1/Vκ2 variants binding Tau

| Ab | EC50 |
|---|---|
| 7G6-HCzu1-LCzu1 | 119.2 |
| 7G6-HCzu2-LCzu1 | 104.7 |
| 7G6-HCzu3-LCzu1 | 131.4 |
| 7G6-HCzu4-LCzu1 | 184.7 |
| 7G6-HCzu1-LCzu2 | 133.1 |
| 7G6-HCzu2-LCzu2 | 208.9 |
| 7G6-HCzu3-LCzu2 | 171.6 |
| 7G6-HCzu4-LCzu2 | 168.2 |
| 7G6-HCzu1-LCzu3 | 164.9 |
| 7G6-HCzu2-LCzu3 | 152.3 |
| 7G6-HCzu3-LCzu3 | 188.9 |
| 7G6-HCzu4-LCzu3 | 176.5 |
| 7G6-HCzu1-LCzu4 | 191.7 |
| 7G6-HCzu2-LCzu4 | 226.9 |
| 7G6-HCzu3-LCzu4 | 253 |
| 7G6-HCzu4-LCzu4 | 282.6 |
| 7G6-HCzu1-LCzu5 | 167.1 |
| 7G6-HCzu2-LCzu5 | 186.9 |
| 7G6-HCzu3-LCzu5 | 183.6 |
| 7G6-HCzu4-LCzu5 | 199.4 |
| 7G6-HCzu5-LCzu2 | 147 |
| 7G6-HCzu5-LCzu2 | 154.2 |
| 7G6-HCzu3-LCzu6 | 135 |
| ms7G6 | 34.36 |

*The EC50s were determined by fitting a non-linear regression curve in GraphPad Prism 6.05.

[0327] To reduce any potential immunogenicity, another series of mutants was generated with increasing numbers of human residues (7G6-HCzu6, 7G6-HCzu 7, and 7G6-HCzu 8; FIG. 12). Since Vh Ser57 showed little difference in binding to Cys57, most of the mutants contained Ser57. To further confirm that serine was a viable substitution for cysteine at position 57, two mutant pairs differing at only position 57 were generated (7G6-HCzu7 and 7G6-HCzu9 and 7G6-HCzu8 and 7G6-HCzu10; FIG. 12).

[0328] All Vκ variants were engineered with Ser49, except 7G6-LCzu10 which was made to determine whether the human residue Tyr49 was a viable substitute for Cys49. 7G6-LCzu7 was analogous to 7G6-LCzu1 and 7G6-LCzu3 except with Ser49. 7G6-LCzu21 was analogous to 7G6-LCzu5 and 7G6-LCzu22 was analogous to 7G6-LCzu4, again with Ser49. 7G6-LCzu8 had a valine at position 30 to determine whether the human residue at this position retained Tau binding. Position 34 was somewhat buried in the structure and it was possible it did not contribute to antigen binding, therefore the human residue Asn34 at the end of CDRL1 was engineered into 7G6-LCzu9. All HC variants were coexpressed with 7G6-LCzu6 and all LC variants were coexpressed with 7G6-HCzu5.

[0329] Tau binding was analyzed by a direct ELISA as above. Samples were incubated for 1 hour at room temperature in 96-well plates coated with wild-type 2N4R Tau. After a wash step, HRP-conjugated anti-mouse or anti-human detection antibodies were added to the wells. The anti-mouse antibody was used to detect ms7G6. The amount of HRP activity in each well was measured by QuantaBlu fluorescent substrate and the RFUs were detected by a SpectraMax M5 plate reader. A majority of the mAbs showed little difference in Tau binding in a direct ELISA assay (FIG. 14; Table 4). The notable exception was LCzu9 which exhibited no binding, even at the highest concentrations. Therefore, Vκ Glu34 was critical for antigen binding. In addition, LCzu22 showed reduced binding; Vκ Tyr36 in combination with Arg46 resulted in disruption of the antigen binding site.

TABLE 4
EC50s* of humanized 7G6
Vh1/Vκ2 variants binding Tau

| | EC50 |
|---|---|
| 7G6-HCzu5-LCzu6 | 299.8 |
| 7G6-HCzu6-LCzu6 | 320.9 |
| 7G6-HCzu7-LCzu6 | 270.3 |
| 7G6-HCzu8-LCzu6 | 256.5 |
| 7G6-HCzu9-LCzu6 | 250.4 |
| 7G6-HCzu10-LCzu6 | 277.7 |
| 7G6-HCzu5-LCzu7 | 212.1 |
| 7G6-HCzu5-LCzu8 | 221 |
| 7G6-HCzu5-LCzu9 | NB |
| 7G6-HCzu5-LCzu10 | 209.6 |
| 7G6-HCzu5-LCzu21 | 301.5 |
| 7G6-HCzu5-LCzu22 | 813.9 |
| ms7G6 | 86.33 |

*The EC50s were determined by fitting a non-linear regression curve in GraphPad Prism 6.05. NB (no binding) indicates little to no binding to Tau.

[0330] Binding of humanized and mouse antibodies were analyzed by surface plasmon resonance (BIAcore™) to determine their relative association rates (kₐ), dissociation rates (k_{d}), and equilibrium binding constants (K_{D}). Anti-mouse or anti-human antibodies were immobilized on a CM5 chip and sample mAbs were captured on the chip. 2N4R Tau was flowed over the chip and binding observed. The binding constants kₐ, k_{d}, and K_{D} were determined using a 1:1 Langmuir fitting model. Antibody ms7G6 derived from hybridoma or IgG2a or IgG2b recombinant material showed no difference in the association or dissociation rates (Table 5). Among the 7G6 HC variants, there were only slight differences, and the cysteine to serine mutations did not affect Tau binding. 7G6-LCzu2, LCzu6, LCzu7, LCzu8, and LCzu21 bound Tau similarly, demonstrating that the amino acids differing between these mAbs had little impact on binding. The humanized samples demonstrated better binding to Tau than the mouse mAbs, but this was most likely due to the necessity of using different capture antibodies in this assay format.

TABLE 5
BIAcore ™ analysis of mouse and humanized Vh1/Vκ2

| | Species/ | kₐ (×10⁵ | k_{d} (×10⁻³ | K_{D} |
|---|---|---|---|---|
| MAb | Isotype | M⁻¹sec⁻¹) | sec⁻¹) | (nM) |
| 7G6-HCzu1-LCzu1 | human/IgG1 | 25.70 | 0.519 | 0.202 |
| 7G6-HCzu2-LCzu1 | human/IgG1 | 28.30 | 0.640 | 0.226 |
| 7G6-HCzu3-LCzu1 | human/IgG1 | 27.70 | 0.856 | 0.309 |
| 7G6-HCzu4-LCzu1 | human/IgG1 | 35.70 | 0.847 | 0.237 |
| 7G6-HCzu1-LCzu2 | human/IgG1 | 22.00 | 0.241 | 0.110 |
| 7G6-HCzu2-LCzu2 | human/IgG1 | 21.20 | 0.214 | 0.101 |
| 7G6-HCzu3-LCzu2 | human/IgG1 | 20.00 | 0.242 | 0.121 |
| 7G6-HCzu4-LCzu2 | human/IgG1 | 20.00 | 0.242 | 0.121 |
| 7G6-HCzu5-LCzu2 | human/IgG1 | 18.60 | 0.237 | 0.127 |
| 7G6-HCzu3-LCzu6 | human/IgG1 | 19.00 | 0.227 | 0.120 |
| 7G6-HCzu5-LCzu6 | human/IgG1 | 21.4 | 0.206 | 0.0961 |
| 7G6-HCzu6-LCzu6 | human/IgG1 | 22.1 | 0.213 | 0.0961 |
| 7G6-HCzu7-LCzu6 | human/IgG1 | 20.8 | 0.226 | 0.109 |
| 7G6-HCzu8-LCzu6 | human/IgG1 | 21.7 | 0.21 | 0.0968 |
| 7G6-HCzu9-LCzu6 | human/IgG1 | 20.6 | 0.193 | 0.0938 |
| 7G6-HCzu10-LCzu6 | human/IgG1 | 19.8 | 0.213 | 0.108 |
| 7G6-HCzu5-LCzu7 | human/IgG1 | 31.4 | 0.304 | 0.0968 |
| 7G6-HCzu5-LCzu8 | human/IgG1 | 36 | 0.298 | 0.0828 |
| 7G6-HCzu5-LCzu9 | human/IgG1 | no binding | no binding | no binding |
| 7G6-HCzu5-LCzu10 | human/IgG1 | 32.7 | 0.53 | 0.162 |
| 7G6-HCzu5-LCzu21 | human/IgG1 | 29.3 | 0.278 | 0.095 |
| 7G6-HCzu5-LCzu22 | human/IgG1 | 18.8 | 2.77 | 1.48 |
| Hybridoma ms7G6 | mouse/IgG2b | 4.64 | 1.533 | 3.305 |
| recombinant ms7G6 | mouse/IgG2b | 3.73 | 1.556 | 4.170 |
| recombinant ms7G6 | mouse/IgG2a | 5.49 | 1.497 | 2.725 |

[0331] These data, along with the data from ELISA assay, demonstrated the requirement for 7G6 Vκ Glu34 and the detrimental combination of 7G6 Vκ Tyr36 and Arg46. 7G6 Vκ residues Tyr36 and Leu46 in LCzu6 were slightly favored over the human Phe36 and Arg46 residues in 7G6-LCzu7 and 7G6-LCzu8, but retaining the human residues at these positions outweighed the minor reduction in the k_{d}. The human Vκ Tyr57 in 7G6-LCzu10 had a significant impact on the k_{d}.

### 10B.a.3. SDS-PAGE Analysis of HC/LC Stability for Vh1 and Vκ2 Variants

[0332] Two micrograms of each mAb were mixed with 4×NuPAGE™ LDS Sample Buffer and separated non-reduced on a 4-12% Bis-Tris SDS-PAGE gel in MOPS buffer. Gels were stained with InstantBlue™ and destained in water. All mAbs with Cys49 in the LC (7G6-LCzu2, 7G6-LCzu3, 7G6-LCzu4, and 7G6-LCzu5) were not stable, and under non-reducing conditions, HC-HC-LC trimers, HC-HC dimers, and free LC were separated by SDS-PAGE (FIG. 15). 7G6-LCzu2 had fewer lower molecular weight species, likely due to this Vκ having two additional mouse residues, Tyr36 and Leu46, stabilizing the Vh-Vκ interaction. 7G6-LCzu3, 7G6-LCzu4, and 7G6-LCzu5 had one or both of these residues changed to the human Phe36 and/or Arg46. The least stable mAbs were the LCzu3 variants with both human residues. 7G6-LCzu7, 7G6-LCzu8, 7G6-LCzu9, and 7G6-LCzu22 had a small amount of free light chain, suggesting the HC and LC interaction in these samples may not be optimal, resulting in a small amount of antibodies not forming the HC-LC interchain disulfide bond. As with 7G6-LCzu3, these LC variants have human residues at one or both positions 36 and 46. 7G6-LCzu10 and 7G6-LCzu21 also have human residues at these positions, but no free LC was seen, possibly a result of incomplete staining by the InstantBlue™ stain.

### 10B.b IGHV3/IGKV1 Humanization

### 10B.b.1 Humanized Vh3 and Via Variants and Analysis for Tau Binding by ELISA

[0333] The humanized 7G6 variants discussed above utilized the human germline variable domain families IGHV1 and IGKV2 chosen based on their similarity to ms7G6. However, these families are underrepresented in the human population, thereby increasing the chance the humanized variants would be immunogenic in patients (Brezinschek H P, Foster S J, Dörner T, Brezinschek R I, Lipsky P E. Pairing of variable heavy and variable kappa chains in individual naive and memory B cells. J Immunol. 1998 May 15; 160(10):4762-7; Jayaram N, Bhowmick P, Martin A C. Germline Vh/VK pairing in antibodies. Protein Eng Des Sel. 2012 October; 25(10):523-9; Tiller T, Schuster I, Deppe D, Siegers K, Strohner R, Herrmann T, Berenguer M, Poujol D, Stehle J, Stark Y, HeBling M, Daubert D, Felderer K, Kaden S, Minn J, Enzelberger M, Urlinger S. A fully synthetic human Fab antibody library based on fixed Vh/VK framework pairings with favorable biophysical properties. MAbs. 2013 May-June; 5(3):445-70). Therefore the ms7G6 CDRs were grafted onto the more common IGHV3 and IGKV1 families (FIG. 16).

[0334] The aforementioned in silico model of ms7G6 was analyzed as above for human residues in close proximity (5 Å) of the CDRs. Human residues in Vh at positions 49, 71, 76, 78, and 94 and in Vκ at positions 2 and 57 were identified as potential critical framework residues. Two humanized variants of the Vh and Vκ were generated, one with all human framework residues (7G6-HCzu11; 7G6-LCzu11) and one with potentially critical residues back-mutated (7G6-HCzu12; 7G6-HCzu12) (FIG. 17). Both HCs were coexpressed with both LCs.

[0335] 2N4R Tau was coated on 96-well plates and various concentrations of humanized mAbs were added to the wells as above. MAbs bound to Tau were detected with either an HRP-conjugated anti-mouse antibody (ms7G6) or anti-human antibody (remaining samples). All humanized mAbs bound similarly to Tau, but the 7G6-HCzu12-LCzu12 mAb had the lowest EC50 (FIG. 18 & Table 6). Both mouse mAbs showed better binding than the humanized variants, possibly due to the different detection antibodies used between the mouse and human samples. These data suggest that at least some of the human residues in proximity to the CDRs negatively affect antigen binding.

TABLE 6
EC50s of humanized 7G6Vh1/Vκ2
variants binding Tau

| Ab | EC50 |
|---|---|
| ms7G6 | 89.88 |
| 7G6-HCzu11-LCzu11 | 245.9 |
| 7G6-HCzu11-LCzu12 | 284.2 |
| 7G6-HCzu12-LCzu11 | 218.4 |
| 7G6-HCzu12-LCzu12 | 153.4 |

The EC50s were determined by fitting a non-linear regression curve in GraphPad Prism 6.05.

[0336] To reduce potential immunogenicity, another series of mutants was generated with increasing numbers human residues. Residues in the C-terminal half of CDRH2 had little impact on Tau binding in Vh1-based variant 7G6-HCzu4. Therefore, these residues were changed to the Vh3 germline residues in 7G6-HCzu13, 7G6-HCzu14, 7G6-HCzu19 and 7G6-HCzu20 (FIG. 17). Variants of 7G6-HCzu12 were made such that mouse residues were replaced with human in order of probable increasing importance on antigen binding, based on the in silico ms7G6 model. For instance, the sidechain of Ser76 was on a loop facing away from the CDRs and was the least likely residue to impact the CDR-antigen interaction. Therefore it was the first residue to be changed to human residue Asn76 in 7G6-HCzu15. Residue 49 was mutated next (7G6-HCzu16), then 78 (7G6-HCzu17), 71 (7G6-HCzu18), and finally 94 (7G6-HCzu20).

[0337] With little difference between 7G6-LCzu11 and 7G6-LCzu12, it was expected that human residues at positions 2 and 57 would have little impact on antigen binding. Therefore, each of these was mutated one at a time. For position 57, tyrosine and serine substitutions were analyzed. A valine at position 30 was introduced in 7G6-LCzu16 and 7G6-LCzu17. The human residue Asn34 at the end of CDRL1 was engineered into 7G6-LCzu17. All HC variants were coexpressed with 7G6-LCzu12 and all LC variants were coexpressed with 7G6-HCzu12.

[0338] A majority of the mAbs showed little difference in Tau binding in a direct ELISA assay (FIG. 19 & Table 7). The notable exception was LCzu17 which exhibited no binding, even at the highest concentrations. Therefore, Vκ Glu34 was critical for antigen binding.

TABLE 7
EC50s of humanized 7G6Vh1/Vκ2
variants binding Tau

| Ab | EC50 |
|---|---|
| 7G6-HCzu12-LCzu12 | 283.4 |
| 7G6-HCzu13-LCzu12 | 320.1 |
| 7G6-HCzu14-LCzu12 | 335.1 |
| 7G6-HCzu15-LCzu12 | 358 |
| 7G6-HCzu16-LCzu12 | 313.1 |
| 7G6-HCzu17-LCzu12 | 341.6 |
| 7G6-HCzu18-LCzu12 | 278.4 |
| 7G6-HCzu19-LCzu12 | 216.4 |
| 7G6-HCzu20-LCzu12 | 317.2 |
| 7G6-HCzu12-LCzu13 | 263.3 |
| 7G6-HCzu12-LCzu14 | 248.6 |
| 7G6-HCzu12-LCzu15 | 287.6 |
| 7G6-HCzu12-LCzu16 | 328.8 |
| 7G6-HCzu12-LCzu17 | NB |
| ms7G6 | 86.33 |

The EC50s were determined by fitting a non-linear regression curve in GraphPad Prism 6.05. NB (no binding) indicates little to no binding to Tau. 10B.b.2 BIAcore ™ analysis of Tau affinity for Vh3 and Vκ1 variants

[0339] Binding of humanized and mouse antibodies were analyzed by BIAcore™ to determine their relative association rates (ka), dissociation rates (kd), and equilibrium binding constants (K_{D}). Anti-mouse or anti-human antibodies were immobilized on a CM5 chip and sample mAbs were captured on the chip. 2N4R Tau was flowed over the chip and binding observed. The binding constants kₐ, k_{d}, and K_{D} were determined using a 1:1 Langmuir fitting model. Both 7G6-HCzu12-based mAbs had similar kₐ and k_{d} values (Table 8). However, the kₐ of 7G6-HCzu11 was decreased, though the k_{d} was unaffected. Therefore, human residues in the Vh3 framework impact binding to Tau. As with the ELISA assay, 7G6-LCzu17 did not bind Tau. The difference in k_{d} between 7G6-HCzu12, 7G6-HCzu13, and 7G6-HCzu14 suggests the CDRH2 C-terminal human residues have a negative impact on antigen binding. The decrease in k_{d} was not observed for 7G6-HCzu19 and 7G6-HCzu20 which also have human residues in the region; however, these mAbs had a decrease in kₐ. 7G6-HCzu15 did not bind to the chip very well, and the data from this mAb were questionable. While no specific data on the single S76N mutation was available, the kₐ and k_{d} values for 7G6-HCzu16, 7G6-HCzu17, 7G6-HCzu18 were similar to 7G6-HCzu12 suggesting the S76N mutation should not affect Tau binding. The kₐ for 7G6-HCzu20 was less than 7G6-HCzu19 and may be a result of the K94R mutation. Therefore human residues at position 49, 71, 76, and 78 did not appear to affect Tau binding. The humanized samples demonstrated better binding to Tau than the mouse mAbs, but this was most likely due to the necessity of using different capture antibodies in this assay format.

TABLE 8
BIAcore ™ analysis of mouse and humanized 7G6 Vh3/Vκ1 mAbs

| | Species/ | kₐ (×10⁵ | k_{d} (×10⁻³ | K_{D} |
|---|---|---|---|---|
| MAb | Isotype | M⁻¹sec⁻¹) | sec⁻¹) | (nM) |
| 7G6-HCzu11-LCzu11 | human/IgG1 | 8.53 | 0.175 | 0.205 |
| 7G6-HCzu12-LCzu11 | human/IgG1 | 13.80 | 0.181 | 0.132 |
| 7G6-HCzu12-LCzu12 | human/IgG1 | 14.90 | 0.193 | 0.129 |
| 7G6-HCzu12-LCzu12 | human/IgG1 | 17.2 | 0.151 | 0.0875 |
| 7G6-HCzu13-LCzu12 | human/IgG1 | 14.2 | 0.239 | 0.168 |
| 7G6-HCzu14-LCzu12 | human/IgG1 | 14.6 | 0.194 | 0.133 |
| 7G6-HCzu15-LCzu12 | human/IgG1 | 20.2 | 0.278 | 0.138 |
| 7G6-HCzu16-LCzu12 | human/IgG1 | 15.3 | 0.174 | 0.114 |
| 7G6-HCzu17-LCzu12 | human/IgG1 | 17 | 0.124 | 0.073 |
| 7G6-HCzu18-LCzu12 | human/IgG1 | 15.7 | 0.128 | 0.0815 |
| 7G6-HCzu19-LCzu12 | human/IgG1 | 12.5 | 0.152 | 0.121 |
| 7G6-HCzu20-LCzu12 | human/IgG1 | 11.4 | 0.136 | 0.119 |
| 7G6-HCzu12-LCzu13 | human/IgG1 | 14 | 0.124 | 0.0888 |
| 7G6-HCzu12-LCzu14 | human/IgG1 | 17.3 | 0.119 | 0.0689 |
| 7G6-HCzu12-LCzu15 | human/IgG1 | 14.7 | 0.141 | 0.0959 |
| 7G6-HCzu12-LCzu16 | human/IgG1 | 14.9 | 0.148 | 0.099 |
| 7G6-HCzu12-LCzu17 | human/IgG1 | no binding | no binding | no binding |
| Hybridoma ms7G6 | mouse/IgG2b | 4.64 | 1.533 | 3.305 |
| recombinant ms7G6 | mouse/IgG2b | 3.73 | 1.556 | 4.170 |
| recombinant ms7G6 | mouse/IgG2a | 5.49 | 1.497 | 2.725 |

[0340] There was little difference between the kₐ or k_{d}. values for any 7G6 LC variant, except 7G6-LCzu17, which did not bind Tau due to Asn34. Therefore, the human Ile2 had no effect on antigen binding. Cysteine, serine, and tyrosine all appeared to be tolerated at position 57. A valine at position 30 had no impact on Tau binding.

### 10B.b.3 SDS-PAGE Analysis of HC/LC Stability for Vh3 and Via Variants

[0341] Two micrograms of each mAb were mixed with 4×NuPAGE™ LDS Sample Buffer and separated non-reduced on a 4-12% Bis-Tris SDS-PAGE gel in MOPS buffer. Gels were stained with InstantBlue and destained in water. The more human 7G6-HCzu11, especially when paired with the less human 7G6-LCzu12, resulted in HC-LC dimers and free HC (FIG. 20A). Further, 7G6-HCzu18 and 7G6-HCzu19 showed significant fragments (FIGS. 20B and 20C). These two antibodies differ from the others at position 71. Therefore, the human residue Arg41, while not impacting Tau binding, contributed to destabilization of the HC-LC interaction. All LC variants showed no antibody fragments. Contrary to Vh1-Vκ2 mAbs analyzed above, Cys49 did not produce HC-HC-LC trimers, HC-HC dimers, or free LC.

10B.c. Screening of Humanized Antibodies

[0342] Based on human-ness of the sequences, BIAcore™ affinity data and SDS-PAGE stability data from the IGHV1/IGKV2 humanization, 7G6-HCzu8 was chosen as the most human sequence with the highest affinity for Tau. 7G6-LCzu6 and 7G6-LCzu21 had comparable stability in SDS-PAGE and affinity for Tau but differed by one amino acid at position 36. Both light chains were chosen to be coexpressed with 7G6-HCzu8 to determine the best IGHV1/IGKV2-based mAb.

[0343] Another round of mutagenesis was performed on the most human, highest affinity, and most stable IGHV3 and IGKV1 variants to remove the unpaired cysteines at position 57 and 49, respectively. 7G6-HCzu17 and 7G6-HCzu18 were chosen as the most human framework residues with the highest affinity. 7G6-HCzu18 was super-humanized by introducing human residues into the C-terminal portion of CDRH2 to generate 7G6-HCzu21, but the affinity was never analyzed. 7G6-HCzu18, 7G6-HCzu21, and 7G6-HCzu17 all contained a cysteine at position 57, and a serine was introduced at position 57 in all three variants to generate 7G6-HCzu24, 7G6-HCzu23, and 7G6-HCzu25, respectively (FIG. 17). 7G6-LCzu14 and 7G6-LCzu15 were the most human Vκ sequences with the highest affinity. 7G6-LCzu14 retained Cys49 and was therefore mutated to remove the unpaired cysteine and was named 7G6-LCzu18. Each IGHV3 HC was paired with each IGKV1 LC.

[0344] 10B.c.1 Intact Mass Analysis

[0345] The mass of each mAb was analyzed by ESI-MS to confirm the theoretical mass matched the observed mass. MAbs were digested with IdeS to generate F(ab′)2 fragments, followed by reduction with 2 mM DTT and heating at 60° C. for 3 min. The mass of the Fd (Vh-CH1) and LC fragments were analyzed by ESI-MS. 7G6-HCzu8 contained an N-terminal pyroglutamic acid, a typical post-translational modification of N-terminal glutamines. All observed masses were within 3 Daltons of the predicted masses (Table 9).

TABLE 9
ESI-MS analysis of humanized variants

| | Fd | PyrQ | Cys | Calculated | Observed | dMass |
|---|---|---|---|---|---|---|
| 7G6- | 25447 | 17 | 4 | 25426 | 25425 | −1 |
| HCzu8- | | | | | | |
| LCzu6 | | | | | | |
| 7G6- | 25447 | 17 | 4 | 25426 | 25425 | −1 |
| HCzu8- | | | | | | |
| LCzu21 | | | | | | |
| 7G6- | 25349 | | 4 | 25345 | 25345 | 0 |
| HCzu23- | | | | | | |
| LCzu15 | | | | | | |
| 7G6- | 25526 | | 4 | 25522 | 25522 | 0 |
| HCzu24- | | | | | | |
| LCzu15 | | | | | | |
| 7G6- | 25469 | | 4 | 25465 | 25463 | −2 |
| HCzu25- | | | | | | |
| LCzu15 | | | | | | |
| 7G6- | 25349 | | 4 | 25345 | 25345 | 0 |
| HCzu23- | | | | | | |
| LCzu18 | | | | | | |
| 7G6- | 25526 | | 4 | 25522 | 25521 | −1 |
| HCzu24- | | | | | | |
| LCzu18 | | | | | | |
| 7G6- | 25469 | | 4 | 25465 | 25462 | −3 |
| HCzu25- | | | | | | |
| LCzu18 | | | | | | |

| | LC | Cys | Calculated | Observed | dMass |
|---|---|---|---|---|---|
| 7G6- | 24007 | 4 | 24003 | 24003 | 0 |
| HCzu8- | | | | | |
| LCzu6 | | | | | |
| 7G6- | 23991 | 4 | 23987 | 23988 | 1 |
| HCzu8- | | | | | |
| LCzu21 | | | | | |
| 7G6- | 23953 | 4 | 23949 | 23949 | 0 |
| HCzu23- | | | | | |
| LCzu15 | | | | | |
| 7G6- | 23953 | 4 | 23949 | 23949 | 0 |
| HCzu24- | | | | | |
| LCzu15 | | | | | |
| 7G6- | 23953 | 4 | 23949 | 23948 | −1 |
| HCzu25- | | | | | |
| LCzu15 | | | | | |
| 7G6- | 23967 | 4 | 23963 | 23963 | 0 |
| HCzu23- | | | | | |
| LCzu18 | | | | | |
| 7G6- | 23967 | 4 | 23963 | 23963 | 0 |
| HCzu24- | | | | | |
| LCzu18 | | | | | |

[0346] 10B.c.2 Tau Binding BIAcore™ Assay

[0347] Tau binding for humanized mAbs was analyzed by BIAcore™ in two different formats. The first format was performed as above, i.e. mAbs were captured with an immobilized species-specific anti-Fc antibody. The limitation of this format is seen in Tables 5 and 8 where the affinities of the parental mouse and humanized mAbs cannot be directly compared due to the differences in the capture antibodies. In the second format, biotinylated mAbs were captured on a streptavidin-coated chip. This latter format allowed direct comparison of Tau binding affinity between humanized and the parental mouse antibody since the capture method was identical.

[0348] 10B.c.2.i Fc-Specific Capture

[0349] The final humanized mAbs were analyzed by BIAcore™ to determine the kₐ, k_{d}, and K_{D} for binding to Tau as above (Table 10). There was a significant change in the off rate (10 from 7G6-HCzu23 to 7G6-HCzu24, while 7G6-HCzu24 was similar to 7G6-HCzu25, which was also seen in the overall affinity K_{D} as well. This confirmed the importance of retaining mouse residues in CDRH2, as seen above in Table 7.

TABLE 10
BIAcore ™ analysis of humanized 7G6 mAbs
binding monomeric Tau (anti-human capture)

| | kₐ (×10⁵ | k_{d} (×10⁻³ | K_{D} |
|---|---|---|---|
| MAb | M⁻¹sec⁻¹) | sec⁻¹) | (nM) |
| 7G6-HCzu8-LCzu6 | 14.9 | 0.22 | 0.15 |
| 7G6-HCzu23-LCzu15 | 16.1 | 0.39 | 0.25 |
| 7G6-HCzu24-LCzu15 | 8.09 | 0.11 | 0.13 |
| 7G6-HCzu25-LCzu15 | 9.85 | 0.13 | 0.13 |
| 7G6-HCzu23-LCzu18 | 17.1 | 0.37 | 0.22 |
| 7G6-HCzu24-LCzu18 | 9.48 | 0.09 | 0.09 |
| 7G6-HCzu25-LCzu18 | 11.1 | 0.14 | 0.13 |

[0350] Streptavidin Capture

[0351] Biotinylated humanized and mouse mAbs were captured on a streptavidin-coated chip and kₐ, k_{d}, and K_{D} were determined for binding to Tau (Table 11). 7G6-HCzu8-LCzu21 showed a slight drop in affinity (<2-fold) compared with 7G6-HCzu8-LCzu6. Similarly, 7G6-HCzu23 variants had an ˜2-fold drop in affinity compared to 7G6-HCzu24 and 7G6-HCzu25 mAbs, as seen in Table 11. The affinity of 7G6-HCzu8-LCzu6, 7G6-HCzu24-LCzu15, 7G6-HCzu24-LCzu18, 7G6-HCzu25-LCzu15, and 7G6-HCzu25-LCzu18 were all similar. Overall, these antibodies showed an ˜1.4-fold drop in affinity compared with the ms7G6, reflected mainly in a slightly faster off-rate for the humanized forms.

TABLE 11
BIAcore ™ analysis of humanized 7G6 mAbs and mouse
7G6 binding monomeric Tau (streptavidin capture)

| | kₐ (×10⁵ | k_{d} (×10⁻³ | K_{D} |
|---|---|---|---|
| MAb | M⁻¹sec⁻¹) | sec⁻¹) | (nM) |
| 7G6-HCzu8-LCzu6 | 28.20 | 0.258 | 0.0915 |
| 7G6-HCzu8-LCzu21 | 22.80 | 0.313 | 0.1380 |
| 7G6-HCzu23-LCzu15 | 21.80 | 0.332 | 0.1520 |
| 7G6-HCzu23-LCzu18 | 21.40 | 0.390 | 0.1820 |
| 7G6-HCzu24-LCzu15 | 54.20 | 0.487 | 0.0898 |
| 7G6-HCzu24-LCzu18 | 38.10 | 0.304 | 0.0797 |
| 7G6-HCzu25-LCzu15 | 27.10 | 0.270 | 0.0998 |
| 7G6-HCzu25-LCzu18 | 35.00 | 0.307 | 0.0881 |
| ms7G6 | 31.10 | 0.195 | 0.0636 |

[0352] 10B.c.3 Analysis of Homogeneity and Aggregation by SEC-HPLC

[0353] Each mAb was analyzed by SEC-HPLC to determine the homogeneity of the mAb in solution. The profiles of 7G6-HCzu8-LCzu6 and 7G6-HCzu8-LCzu21 mAbs were identical, with a main peak at 14.5 min and wide shoulder suggesting possible product heterogeneity beyond 16 minutes (FIG. 21A). The profiles of 7G6-HCzu23, 7G6-HCzu24, and 7G6-HCzu25 mAbs were identical, with a tight peak around 14.7 min (FIG. 21B).

[0354] 10B.c.4 DSC Analysis

[0355] The thermal melting curves of F(ab′)2 fragments were analyzed by differential scanning calorimetry (DSC). The profiles of the chimeric, 7G6-HCzu8 and 7G6-HCzu25 F(ab′)2 were similar to control non-Tau binding human IgG1 antibodies, mAb1 and mAb2. 7G6-HCzu23 and 7G6-HCzu24, however, contained a second peak, indicating instability of the F(ab′)2 fragment, possibly the dissociation of the HC-LC interaction (FIGS. 22A-L). The transition midpoints of 7G6-HCzu8-LCzu21, 7G6-HCzu25-LCzu15, and 7G6-HCzu25-LCzu18 were similar, ranging from 77.4 to 77.6° C. The midpoint of 7G6-HCzu8-LCzu6 was one degree higher at 78.6° C. (Table 12).

TABLE 12
Melting transition midpoints of
humanized 7G6 F(ab′)2 fragments

| | Transition | Transition |
|---|---|---|
| Analysis 1 | Midpoint-1 | Midpoint-2 |
| 7G6-HCzu8-LCzu6 | N/A | 78.61 |
| 7G6-HCzu23-LCzu15 | 67.81 | 73.41 |
| 7G6-HCzu24-LCzu15 | 68.04 | 73.38 |
| 7G6-HCzu25-LCzu15 | N/A | 77.42 |
| 7G6-HCzu23-LCzu18 | 67.81 | 73.41 |
| 7G6-HCzu24-LCzu18 | 68.78 | 73.26 |
| 7G6-HCzu25-LCzu18 | N/A | 77.6 |
| | Transition | Transition |
| Analysis 2 | Midpoint-1 | Midpoint-2 |
| 7G6-HCzu8-LCzu6 | N/A | 78.58 |
| 7G6-HCzu8-LCzu21 | N/A | 77.51 |

[0356] 10B.d T Cell Epitope Analysis

[0357] Humanized sequences were analyzed in silico by Stealth Biologics for potential immunoreactive T cell epitopes. Two sequences for each variable region germline family were analyzed, each contained differing amounts of human and mouse residues. mAb1-2a and mAb1-2b represented IGHV1-46a/IGKV2-30a and mAb3-1a and mAb3-1b represented IGHV3-23b/IGKV1-39b. Though only four sequences were analyzed for each variable domain, all potential T cell epitopes present in the tested humanized mAbs were represented. Peptide epitopes having identity to greater than 5% of human germline sequences were considered lower risk, as were peptides binding only one or two HLA alleles.

[0358] FIGS. 23 and 24 summarize the analysis of epitopes present in the mAbs. The peptides in the tables were identified as having 5% or less identity to human germline sequences. The percent homology of the peptides to variable domain germline sequences was also taken into consideration. Peptides with ˜5% or less homology to variable region germline sequences and/or were predicted to bind three or more HLA alleles were identified as higher risk (highlighted in gray).

[0359] 7G6-HCzu8 and 7G6-HCzu25 both contained a common low-risk peptide at position 32 with no homology to germline sequences that bound 3 alleles (FIGS. 23A and 23B). Peptide 2 was predicted to be a low risk in 7G6-HCzu25, but the 7G6-HCzu8 peptide 2 was not. Peptide 64 was present as a risk in both HCs, predictively binding 3 alleles. The peptide sequence in 7G6-HCzu8 may present less of a risk as it has some homology to germline variable domains. Peptide 70 in 7G6-HCzu8, but not 7G6-HCzu25, posed a slight risk.

[0360] There was one difference between 7G6-LCzu6 and 7G6-LCzu21 where peptide 38 in 7G6-LCzu21 was predicted to bind 1 HLA allele but presented a very low risk (FIGS. 24A-24D). Between 7G6-LCzu15 and 7G6-LCzu18 there was only one difference with peptide 2 that posed a higher risk in 7G6-LCzu15 than 7G6-LCzu18 as there was little to no homology to variable domain germline sequences. Comparing 7G6-LCzu6/7G6-LCzu21 with 7G6-LCzu15/7G6-LCzu18, 7G6-LCzu6/7G6-LCzu21 sequences contained 9 potentially immunogenic peptides while 7G6-LCzu15/7G6-LCzu18 contained 6. Peptides 51 and 52 were the same between all LCs and peptides 88-94 were the same or similar, with the exception being peptide 90 present in 7G6-LCzu6/7G6-LCzu21 that was not present in 7G6-LCzu15/7G6-LCzu18. Peptides 2 and 3 were riskier in 7G6-LCzu6/7G6-LCzu21 than in 7G6-LCzu15/7G6-LCzu18.

### 10C. Summary

[0361] In summary, ms7G6 was humanized on two different human germline variable domain families with similar affinity to ms7G6.

[0362] The human germlines closest to the mouse sequence were IGHV1-46 and IGKV2-30. Even though several mouse framework residues were suspected to be required to maintain antigen binding, Tau binding was not affected by human framework residue (7G6-HCzu1/7G6-HCzu8). Further, Tau binding was not affected by mutation of the unpaired Cys57 to a serine (7G6-HCzu5/7G6-HCzu8) or super-humanization of CDRH2 at residues 60, 61, 64, and 65 (7G6-HCzu4/7G6-HCzu8). Grafting the Vκ CDRs on the IGKV2 did not result in a dramatic decrease in Tau binding, but the addition of one or two mouse framework residues stabilized the HC-LC interaction. Leu46 with or without Tyr36 increased the stability of Vh-Vκ interaction, as analyzed by SDS-PAGE, and the Tyr36-Leu46 (7G6-LCzu2/7G6-LCzu6) combination resulted in an antibody with slightly higher affinity to Tau than with Leu46 or Tyr36 alone (7G6-LCzu/7G6-LCzu21 and 7G6-LCzu4/7G6-LCzu22, respectively). Though there was a slight risk in immunogenicity with a leucine at position 46, the risk was low. The unpaired Cys49 could be substituted with a serine, but a tyrosine substitution resulted in an increase in the dissociation rate.

[0363] The human germline variable domain families IGHV3-23 and IGKV1-39 were chosen to potentially reduce the immunogenicity of the humanized mAb by utilizing the more commonly expressed IGHV3 and IGKV1 families. Grafting CDRs onto the IGHV3 germline required one or more mouse residues. Arg94 could not be the human lysine residue. Mouse residues at positions 60, 61, 62, 63, and 65 were required for optimal antigen binding. An arginine at 71 did not affect antigen binding but was required for stability of the Vh-Vκ interaction (7G6-HCzu12, 7G6-HCzu13, 7G6-HCzu14, 7G6-HCzu15, 7G6-HCzu16, 7G6-HCzu17, 7G6-HCzu25). Although Va171 resulted in a potentially immunogenic peptide when paired with Phe63 and Ser65, the risk was low. Tau binding was not affected by mutation of the unpaired Cys57 to a serine (7G6-HCzu23, 7G6-HCzu24, 7G6-HCzu25). Human residues throughout the IGKV1 framework did not affect antigen binding or stability (7G6-LCzu18).

[0364] For all antibodies tested, there were little differences in the pI and thermal stability.

### Example 11: Immunohistochemistry with 7G6-HCzu25/LCzu18 on Human Disease Brain

[0365] Paraffin-embedded, fixed human brain sections (8 μm) were dewaxed with multiple changes of xylene and then washed thoroughly in 100% Industrial Methylated Spirit (IMS). Sections were placed into hydrogen peroxide (H₂O₂) and methanol (2 mL hydrogen peroxide per 100 mL methanol) for 10 minutes at room temperature to block endogenous peroxidase and then washed under running tap water for a further 10 minutes. Each section was then treated with 98% formic acid for 10 minutes at room temperature followed by washing in running tap water for another 10 minutes. Sections were then cooked in citrate buffer (pH 6.0) for 10 minutes at pressure and then washed again in running tap water followed by TBS. After a rinse in de-ionized water, each slide was carefully removed and dried around the tissue edge. Once dry, a wax pen was used to mark around the section before applying a Proteinase K solution for 10 minutes at room temperature.

[0366] Once tissue sections were prepared, staining with the 7G6-HCzu25-LCzu18 antibody at different concentrations was carried out with the Klear Human HRP-Polymer DAB Detection Kit (GBI Labs, Bothwell, WA; Cat No. D103-18) as per the manufacturer's instructions. As shown in FIG. 25, antibody 7G6-HCzu25-LCzu18 strongly and specifically recognizes pathological Tau in brains from Alzheimer's disease (neurofibrillary tangles and neuropil threads), PSP (tangles, tufted astrocytes and coiled bodies) and Pick's disease (Pick bodies) by immunohistochemistry. The antibody also showed only a very low level of background staining in all tissues tested.

### Example 12: Affinity of 7G6-HCzu25-LCzu18 to 2N4R Wild Type Tau

### 12A. Materials & Methods

[0367] 12A.c.2. CHO Transient mAb Production

[0368] 7G6-HCzu25-LCzu18 antibody was produced using the Lonza version 7 platform according to the manufacturer's procedures. DNA fragments encoding 7G6-HCzu25 and 7G6-LCzu18 were cloned into an expression plasmid encoding glutamine synthase from Lonza. According to Lonza's protocol for selecting MSX-resistant cell lines, CHO-K1sv cells were electroporated with the 7G6-HCzu25-LCzu18 expression plasmid, followed by seeding 2500 cells per well in 96-well plates in glutamine-free medium in the presence of 25 or 5011M MSX. Wells containing MSX-resistant cell were subjected to several rounds of screening for antibody expression at various cell culture volumes. The cell line 96E7 producing the highest 7G6-HCzu25-LCzu18 antibody titers was chosen for further development and frozen at −80° C. and stored in vapor phase in liquid nitrogen.

[0369] A vial of cell line 96E7 was thawed and cultivated in disposable shake flasks at 36.5° C. and 5% CO₂ followed by further expansion every 3-4 days in larger-sized disposable rocking bags at 36.5° C. and 5% CO₂. A 200 L stainless steel seed bioreactor was employed to final expansion at 36.5° C. with controlled pH and dissolved oxygen prior to the inoculation of a 1000 L stainless steel fed-batch production bioreactor. After 15 days at fed-batch mode and 36.5° C. with controlled pH and dissolved oxygen, the supernatant was harvested through depth filtration.

12A.d. MAb Purification

[0370] Purification was performed using an AKTA process purification platform (GE Healthcare). The purification process consisted of the following steps: Protein A capture chromatography, viral inactivation, depth filtration, anion-exchange flow through chromatography, viral reduction filtration, concentration and final buffer exchange.

[0371] The primary capture step was performed using Amsphere A3 Protein A resin (JSR). The 14.1 L column was equilibrated using 50 mM sodium phosphate, 1 M NaCl, pH 7.0 then loaded up to 45 g protein per liter of resin per cycle. After loading, the column was washed with equilibration buffer followed by 25 mM Bis-Tris, pH 7.0 until UV returned to baseline. Bound material was eluted from the column using 100 mM Glycine, pH 3.4. The pH of the eluate was adjusted to pH 3.6 using 2 M Acetic Acid for low pH viral inactivation. Following a minimum 30 minute static hold, the eluate was neutralized to pH 6.8 using 2 M Tris Base. Depth filtration was immediately performed using Millistak+DOHC and X0HC pod filters (Millipore). The filtrate was further processed using a 6.7 L Capto Q (GE Healthcare) anion exchange column equilibrated in 25 mM Bis-Tris, pH 7.0. The column was loaded up to 150 g protein per liter of resin in non-binding mode. The flow-through product was filtered using a Viresolve Pro viral reduction filter then concentrated to 25 g/L. The material was buffer exchanged into a buffer. The purification procedure was performed on two different monoclonal antibody production runs and designated lots 17-0190 and 18-0146. Several vials from lot 17-0190 were designated 17-0190ARS for use as a reference standard.

12A.f. Surface Plasmon Resonance (SPR) Binding Analyses

[0372] 12A.f.2. Anti-Human Capture Monomeric Tau-Binding Assay

[0373] 12A.f.2.i. Chip Preparation

[0374] Reagent preparation. EDC [1-ethyl-3(3-dimethylaminopropyl)carbodiimide] and NHS (N-hydroxysuccinimide) were dissolved by adding 10.0 ml of Milli-Q water to each vial. Vials were capped tightly and vortexed until the solids were completely dissolved. EDC, NHS, and ethanolamine solutions were aliquoted separately into 0.5 ml aliquots in 7 mm plastic vials, capped, and stored frozen at −20° C. Anti-human IgG (Fc) from kit was centrifuged in microfuge briefly to collect antibody at bottom of tube. 15 μL anti-human IgG (Fc) was removed to a new 1.5 mL microfuge tube and diluted to 300 μL with 285 μL immobilization buffer. Sample was vortexed briefly to mix, then 70 μL was aliquoted to 4 separate 7 mm tubes and capped. 4 aliquots each of EDC, NHS, and ethanolamine were thawed, vortexed briefly to mix and displace any air bubbles trapped on tube walls, and placed in Reagent Rack 2.

[0375] 0.5 L of 1×HBS-P+(Assay Running Buffer) was prepared by diluting 50 mL HBS-P+ to 0.5 L with 450 mL Milli-Q® water in 1 L Pyrex bottle.

[0376] Preparation of instrument for assay. A 1 L bottle of Assay Running Buffer was attached to Buffer A line on BIAcore® T-100, an empty 2 L Pyrex bottle to BIAcore® T-100 waste line, and a 1 L Pyrex bottle filled with fresh 1 L Milli-Q® water to water line. A new CMS chip was docked into the instrument.

[0377] Capture antibody immobilization. In BIAcore® T-100 Control software, a new Wizard Template was opened and “Immobilization” was selected. Chip type was set to “CMS”. Method was set to “Amine”. Ligand blanks were filled in as “anti-human”. Contact time was set to 360 sec for each flow cell and flow rate 5 μL/min. Following completion of these steps, assay was run.

[0378] 12A.f.2.ii. Binding Assay

[0379] Binding experiments were performed using a BIAcore™ T-100 instrument or a T-200 instrument. Running buffer used for the binding assay was HBS-P+/0.2% BSA. 7G6-HCzu25LCzu18 samples were diluted to 100 μg/mL, 100 μL final in Assay Running Buffer, then centrifuged at 18,000×g for 10 min in microcentrifuge at ambient temperature. Dilution to 1 μg/mL was done by removing 40 μL supernatant and diluting to 4.0 mL with Assay Running Buffer in labeled 5 mL tubes. 1 μg/mL antibody solutions were transferred to labeled 1.5 mL capless plastic vials and capped with type 3 caps. Vials were vortexed briefly to remove any air bubbles adhered to tube walls or bottom and placed in Sample and Reagent Rack 1. 200 μL 1 μg/mL solution of diluted reference standard antibody was transferred to a 7 mm plastic vial, capped, vortexed briefly to dislodge adhered air bubbles, and placed in Sample and Reagent Rack 1 (for chip conditioning cycles). Recombinant human wild-type 2N4R tau protein was diluted to 1 μM, 0.5 mL final in Assay Running Buffer (1 mg/mL stock is 21.7 μM). Sample was centrifuged at 18,000×g for 10 min in microcentrifuge at ambient temperature and diluted to 100 nM by removing 400 μL supernatant and diluting to 4.0 mL with Assay Running Buffer in a labeled 5 mL tube. 100 nM solution was serially diluted 3-fold by removing 1333 μL 100 nM solution and diluting in 2667 μL Assay Running Buffer to a final volume of 4.0 mL (33.3 μL). Serial dilution was repeated 6 times, for a total of 8 dilutions (100 nM, 33.3 nM, 11.1 nM, 3.70 nM, 1.23 nM, 0.41 nM, 0.14 nM, and 0.046 nM tau). A 0 nM Tau protein solution was prepared by adding 3 mL Assay Running Buffer to labeled 5 mL tube. Analyte dilutions were transferred to labeled 4 mL plastic vials and capped with type 5 caps, vortexed briefly to remove any air bubbles adhered to tube walls or bottom, and placed in Sample and Reagent Rack 1. For chip conditioning analyte sample, 5 μL of 1 μM Tau protein solution supernatant was removed and diluted to 500 μL in Assay Buffer in a 7 mm plastic vial, capped, vortexed briefly to dislodge adhered air bubbles, and placed in Sample and Reagent Rack 1. Humanized antibodies were captured on flow cells 2, 3, and 4 sequentially at a flow rate of 10 μL/min for a contact time of 36 sec. Dilutions of Tau protein were injected over all 4 flow cells at a flow rate of 30 μL/min for a contact time of 300 sec. Dissociation was followed for 1800 sec. Following each cycle, the surface was regenerated by two sequential injections of 30 sec at 30 μL/min of 3 M MgCl₂ over all four flow cells. After the run, kinetic data fitting was performed using a 1:1 Langmuir model.

### 12B. Results

[0380] The affinity of recombinant human wild-type 2N4R Tau protein to 7G6-HCzu25LCzu18 antibody was determined using an antibody-capture format assay. Following capture of 7G6-HCzu25LCzu18 antibody, human Tau protein was injected over the ligand surface for 300 sec, followed by observation and measurement of dissociation for 1800 sec. After each antibody capture, Tau protein binding, and dissociation cycle, the chip surface was regenerated to the anti-human antibody capture surface using 3M MgCl₂, as required by the manufacturer. Tau protein was analyzed in a concentration range from 100 nM to 0.046 nM (3-fold diluted). The assay was performed in multi-cycle mode, such that a dissociation was performed for each tau protein injection. Each ligand was analyzed on all three flow cells (fc2, fc3, and fc4) in triplicate, in order to eliminate any flow cell-specific effects.

[0381] Capture levels of each ligand on each flow cell (relative to fc1) were determined. These results are listed in Table 13:

TABLE 13
Capture levels of 7G6-HCzu25-LCzu18 ligands

| | fc2 | fc3 | fc4 |
|---|---|---|---|
| 7G6-HCzu25LCzu18, | 189.9 | 185.6 | 196.1 |
| lot 17-0190 | | | |
| 7G6-HCzu25LCzu18, | 177.0 | 173.7 | 183.1 |
| lot 18-0146 | | | |
| 7G6-HCzu25LCzu18, | 161.7 | 158.1 | 166.7 |
| lot 17-0190ARS | | | |

Data are expressed in RU. Values represent averages of ligand capture levels for all relevant cycles. fc - flow cell

[0382] Captured ligand average levels were all between 158 RU and 196 RU. Only slight differences were observed between flow cells within a given ligand.

[0383] Binding data was double-referenced, meaning referenced to both fc1 with no ligand bound and to buffer analyte injections (0 nM Tau protein). Binding data was fitted to a 1:1 Langmuir binding model. This model is appropriate for the assay format, as bivalency of the antibody and resulting avidity effects are not relevant in an antibody capture format. Affinity data for each ligand on individual flow cells was averaged and standard deviation determined. These results are listed in Table 14:

TABLE 14
Affinity constants for human Tau binding to 7G6-HCzu25LCzu18

| | kₐ (M⁻¹sec⁻¹) | kₐ (sec⁻¹) | K_{D} (M) |
|---|---|---|---|
| 7G6-HCzu25LCzu18, | 1.919 ± 0.108 × 10⁶ | 1.256 ± 0.022 × 10⁻⁴ | 6.565 ± 0.493 × 10⁻¹¹ |
| lot 17-0190 | | | |
| 7G6-HCzu25LCzu18, | 1.916 ± 0.093 × 10⁶ | 1.259 ± 0.027 × 10⁻⁴ | 6.587 ± 0.460 × 10⁻¹¹ |
| lot 18-0146 | | | |
| 7G6-HCzu25LCzu18, | 1.914 ± 0.027 × 10⁶ | 1.235 ± 0.018 × 10⁻⁴ | 6.451 ± 0.163 × 10⁻¹¹ |
| lot 17-1090ARS | | | |

[0384] No significant differences in on rate, off-rate, or affinity were observed between the two 7G6-HCzu25LCzu18 drug substance lots and 7G6-HCzu25LCzu18 reference standard.

### Example 13: Fine Epitope Mapping of 7G6-HCzu8-LCzu6 and 7G6-HCzu25-LCzu18

[0385] Fine epitope mapping was performed for 7G6-HCzu8-LCzu6 and 7G6-HCzu25-LCzu18 antibodies as described in Example 3.

[0386] The fluorescent images of the chips and resulting intensity plots show that the 7G6-HCzu8-LCzu6 (FIG. 26A) and 7G6-HCzu25/LCzu18 (FIG. 26B) antibodies both bind to two major sites on the full length Tau protein, similar to the murine 7G6 antibody (see FIG. 3). A stronger fluorescence intensity on the chip was observed generally for 7G6-HCzu25-LCzu18 resulting in some signs of signal saturation and therefore lack of true quantification for some but not all of the peptides. In this experiment, the data analysis software (PepSlide™ Analyser) identified the minimum binding sequence for 7G6-HCzu8-LCzu6 as KHVPGGG (SEQ ID NO: 1135) for the site within the second repeat (positions 298 to 304) and HVPGG (SEQ ID NO: 79) for the site within the fourth repeat (positions 362 to 366) of 2N4R protein. For 7G6-HCzu25-LCzu18, the software identified the minimum required sequence as HVPG (SEQ ID NO: 1133) for both binding sites.

[0387] Similar to murine 7G6, minor binding was observed at two additional sites: HQPGG (SEQ ID NO: 183) at amino acid positions 268 to 272 and HKPGG (SEQ ID NO: 182) at positions 330 to 334 for both 7G6-HCzu8-LCzu6 and 7G6-HCzu25-LCzu18 antibodies. Calculation of average signal intensities for peptides containing the HXPGG sequence (SEQ ID NO: 1136) demonstrated that the 7G6-HCzu8-LCzu6 human antibody showed a 108-fold or 104-fold preference in binding to the HVPGG site (SEQ ID NO: 79) normally contained within the second repeat region of full length 2N4R Tau compared to the HQPGG (SEQ ID NO: 183) (repeat region 1) or HKPGG (SEQ ID NO: 182) (repeat region 3) sequences, respectively. Similarly, a 99-fold or 95-fold preference in 7G6-HCzu8-LCzu6 binding to the HVPGG (SEQ ID NO: 79) site normally contained within the fourth repeat region of full length 2N4R Tau compared to the HQPGG (SEQ ID NO: 183) (repeat region 1) or HKPGG (SEQ ID NO: 182) (repeat region 3) sequences, respectively, was observed. Identical data analysis for 7G6-HCzu25-LCzu18 demonstrated a 65-fold or 100-fold preference in binding to the HVPGG (SEQ ID NO: 79) site normally contained within the second repeat region of full length 4R Tau compared to the HQPGG (SEQ ID NO: 183) (repeat region 1) or HKPGG (SEQ ID NO: 182) (repeat region 3) sequences, respectively. Likewise, a 77-fold or 119-fold preference in 7G6-HCzu25-LCzu18 binding to the HVPGG (SEQ ID NO: 79) site normally contained within the fourth repeat region of full length 4R Tau compared to the HQPGG (SEQ ID NO: 183) (repeat region 1) or HKPGG (SEQ ID NO: 182) (repeat region 3) sequences, respectively, was observed.

### Example 14: Epitope Substitution Scanning of 7G6-HCzu8-LCzu6 and 7G6-HCzu25-LCzu18

[0388] Epitope substitution scanning was performed for 7G6-HCzu8-LCzu6 and 7G6-HCzu25-LCzu18 antibodies as described in Example 4.

[0389] The substitution scanning showed that of the ¹HVPGG⁵ (SEQ ID NO: 79) sequence, both 7G6-HCzu8-LCzu6 and 7G6-HCzu25-LCzu18 antibodies require the ¹H, ³P and ⁴G residues with some substitution tolerability at ²V for peptide binding. These findings were similar to those observed for the murine 7G6 antibody (see Example 4). Some tolerability for substitution was also observed at the second glycine residue (⁵G) of the ¹HVPGG⁵ (SEQ ID NO: 79) sequence in this case. However, this residue was still able to exert considerable influence over the binding of 7G6-HCzu25-LCzu18 and 7G6-HCzu8-LCzu6 antibodies to the longer wild type peptide sequence. Together with Example 13, these results indicate that the HVPGG (SEQ ID NO: 79) sequence facilitates efficient binding of 7G6, 7G6-HCzu25-LCzu18 and 7G6-HCzu8-LCzu6 antibodies to 2N4R Tau at positions 299 to 303 and 362 to 366 within the second and fourth repeats, respectively.

### Example 15: In Vitro Tau Aggregation with 7G6-HCzu25-LCzu18

### Experiment 1

[0390] To determine whether 7G6-HCzu25-LCzu18 antibody could inhibit Tau aggregation in vitro, the antibody was tested in the assay described in Example 5 using the wild type Tau protein with minor modifications. The only difference was the control IgG used in this case was a human IgG1 antibody (BioXCell, catalogue number BE0297).

[0391] In this assay, 7G6-HCzu25-LCzu18 antibody was tested over a time course of several days. FIG. 27 shows that 7G6-HCzu25-LCzu18 could effectively inhibit Tau aggregation in vitro. The effect was statistically significant (t-test) when comparing the IgG control and 7G6-HCzu25-LCzu18 for days 1, 2, 5 and 6 following incubation at 37° C. No significance was observed on day 0 just after the reactions were initiated following heparin addition.

### Experiment 2

[0392] To confirm the humanized 7G6-HCzu25-LCzu18 antibody was comparable to the murine 7G6 antibody at inhibiting Tau aggregation in vitro, both antibodies were compared in the same in vitro Tau aggregation assay. The conditions used were identical to those in Experiment 1 of this Example with the exception that the same mouse IgG2b control antibody was used that was described in Example 5.

[0393] When both murine antibody 7G6 and humanized antibody 7G6-HCzu25-LCzu18 were tested according to the assay conditions provided in Example 5, both antibodies effectively inhibited Tau aggregation in vitro. As shown in FIG. 28, the same effect size was seen between murine 7G6 and 7G6-HCzu25-LCzu18 antibodies.

### Example 16: Cell-Based Seeding Assay Using K18 Tau Fibril Following Immunodepletion with 7G6-HCzu25-LCzu18

[0394] To determine whether immunodepletion of Tau seeds from cell culture medium could prevent further Tau aggregation within cells, the same HEK293 assay system as described in Example 6 was used. In this case however, a potent truncated form of Tau (K18) fibrils were used as Tau seeds rather than full length protein as described previously. The K18 fragment has been studied extensively and is normally expressed recombinantly as residues 244 to 372 of the full length 2N4R Tau protein. This fragment encodes the microtubule binding region of Tau and has been reported to be more aggregate-prone than the full length protein (Shammas et al., Nature Comms., 6, Article number: 7025 (2015)) as well as having the ability to form potent seeds in cell-based assays (Kfoury et al., 2012, J. Biol. Chem., 287: 19440-19451).

### Materials and Methods:

[0395] Preparation of K18 fibrils. Recombinant human Tau-441 (244-372; “K18”) (SignalChem) was dissolved in ultrapure water. Fibrils were generated by mixing together final concentrations of 40 μmol/L K18 protein, 100 mmol/L sodium acetate (pH 7), 2 mmol/L DTT and 240 μg/mL heparin. Reactions were agitated for three days at 37° C. Following incubation, the solution was centrifuged at 135,000 g for 20 minutes at room temperature. The supernatant was discarded, and the pellet was resuspended in 100 mmol/L sodium acetate (pH 7). Aggregated protein was sonicated briefly and then diluted with D-PBS (−) to a concentration of μg/mL and stored at −80° C.

[0396] Preparation of immunodepleted and immunoprecipitated samples. Immunoprecipitation of the prepared K18 fibrils was performed using the Immunoprecipitation Dynabeads® Protein G kit (Thermofisher Scientific, catalogue number 10007D) as per the manufacturer's instructions. Briefly, each immunoprecipitation used 1.5 mg of Dynabeads bound to either 3 or 0.3 μg of 7G6-HCzu25-LCzu18 antibody. Vehicle (no antibody) or 3 μg of commercially available human IgG1 antibody (Bio-Rad Laboratories, Inc.; catalog number HCA192) were included as controls. Antibody-bound (or vehicle-treated) beads were resuspended in 170 μL of buffer containing 0.2% BSA. The K18 fibril solution was then thawed, diluted to 10 μg/mL in PBS, and added to the antibody-bound beads to give a final volume of 200 μL (containing 300 ng of K18 total). This gave final concentrations of either 15 or 1.5 μg/mL of antibody in each immunoprecipitation reaction. Beads were incubated with the K18 fibrils for 20 minutes at room temperature with rotation and non-bound material was retained as the immunodepleted (ID) sample. Antibody-bound material was eluted in 20 μL of the buffer provided in the kit and also retained to provide the immunoprecipitated (IP) samples.

[0397] Cell-based assay. Polyethylenimine (PEI) solution was diluted in purified water to a final concentration of 0.1% and then used to coat a 96-well tissue culture plate at 37° C. for at least one night. Plates were then washed twice with water before adding 150 μl of Dulbecco's modified Eagle's Medium (D-MEM) containing 10% fetal bovine serum and 1% penicillin/Streptomycin (“DMEM (+FBS, P/S)”) medium to each well prior to conducting the assay.

[0398] Lenti-X 293T (Takar Bio Inc.) cells routinely maintained in D-MEM (+FBS, P/S) at 37° C. with 5% CO₂ were transfected in suspension in the same media without antibiotics prior to Tau seed addition. For transfection, 7 μg of pcDNA3.1(+) (Invitrogen) mammalian expression vector containing cDNA encoding the mutant P301S 0N4R Tau isoform was mixed with LTX and Plus™ Reagent (Life Technologies, catalog number 15228-100) as per the manufacturer's recommendation. The resulting mixture was incubated for at least 25 minutes at room temperature before adding directly to a suspension of 6.0×10⁶ Lenti-X 293T cells at a density of 1.0×10⁵ cells/mL. Media was removed from the precoated plate and the treated cell suspension was dispensed at 150 μL per well (1.5×10⁴ cells/well) and incubated for 19 hours at 37° C. in a 5% CO₂ atmosphere.

[0399] Once thawed on ice, 30 lit of each ID sample was diluted into 420 μL of Opti-MEM® I Reduced-Serum Medium (ThermoFisher Scientific, catalog number 31985-062). For IP samples, solutions were also thawed on ice and 2 μL of each was diluted into 50 lit of Opti-MEM® I Reduced-Serum Medium. Then 2.5 μL of P3000 (Thermofisher Scientific, catalog number L3000-008) was added. In a separate tube, 22 μL of Lipofectamine® 3000 (Thermofisher Scientific, catalog number L3000-008) was diluted into 550 μL Opti-MEM® I Reduced-Serum Medium. Then, 52 μL of the diluted Lipofectamine 3000 solution was added to each IP sample containing the P3000 reagent.

[0400] Plated cells were washed twice and left in 75 μL of Opti-MEM® I Reduced-Serum Medium (ThermoFisher Scientific). An equal volume of diluted ID or IP sample as described above was added to each well and incubated for 44 hours at 37° C. in a 5% CO₂ atmosphere. The experiment was performed in quadruplicate.

[0401] Immunocytochemistry. After two days of incubation, cells were fixed in 4% paraformaldehyde for 30 minutes at room temperature. Each well was washed 3 times with 100 lit of purified water and then left in 70 μL of Permeabilization/Blocking/DAPI staining buffer (Triton X-100 solution (final concentration: 0.2%) and Cellstain® DAPI solution (final concentration: 0.1%; Dojindo) diluted in 5% BSA in TBS) was added to each well. The plate was covered and incubated for 30 minutes at room temperature with protection from light. After incubation, Permeabilization/Blocking/DAPI staining buffer was removed, and 804 Thioflavin S (ThS) staining buffer (Thioflavin S dissolved in 50% Ethanol to a final concentration of was added to each well and incubated for 40 minutes at room temperature. Then, each well was washed twice with 50% ethanol and replaced with 250 μL of purified water.

[0402] Imaging assay. Fluorescence images of each well were obtained by an InCell® Analyzer 2200 (GE Healthcare) (ThS: Excitation [Ex]/Emission [Em]=475/511 nm, DAPI: Ex/Em=390/435 nm). Numbers of ThS and DAPI positive signal in each well were then analyzed using the InCell Developer Software (GE Healthcare).

[0403] Data Analysis. The ThS positive rate was calculated using the following formula:

$$\begin{matrix}ThS positive rate = & ThS / DAPI \\ = & number of ThS positive signals / \\ & number of DAPI positive signals .\end{matrix}$$

[0404] Then, the seeding effect of ID or IP samples were calculated using the following formulas (Software: TIBCO Spotfire):
[0405] The seeding effect of ID sample (% of control)=T₁/C₁×100, where
[0406] T₁: Average of ThS positive rate in the antibody treated ID sample, and
[0407] C₁: Average of ThS positive rate in the buffer treated ID sample.
[0408] The seeding effect of IP sample (% of control)=T₂/C₂×100, where
[0409] T₂: Average of ThS positive rate in the antibody treated IP sample, and
[0410] C₂: Average of ThS positive rate in the 7G6-HCzu25-LCzu18 antibody (15 μg/mL)-treated IP sample.

[0411] FIG. 29 shows the normalized ThS positive rate in the cell-based seeding assay after treatment of ID samples. 1.5 and 15 μg/ml of 7G6-HCzu25-LCzu18 antibody removed the seeding effects of K18 fibril (>70% reduction vs human IgG1 kappa control). For the IP samples, 7G6-HCzu25-LCzu18 antibody efficiently induced seeding effects in a concentration-dependent manner (data not shown).

### Example 17: Intrahippocampal P301S Tau Seed Injection Model with 7G6

### Materials and Methods:

[0412] Tau seed was generated by mixing recombinant human 2N4R P301S Tau (40 μmol/L) and heparin (240 μg/mL), followed by an incubation step at 37° C. for 48 to 96 hours in 100 mmol/L sodium acetate, pH7.0, containing 2 mmol/L Dithiothreitol (DTT). Aggregated Tau was collected by ultracentrifugation and resuspended in 100 mmol/L sodium acetate, pH7.0. The resulting fibrils were sonicated and used as seeds for injection.

[0413] 3 μL of Tau seed (1.5 mg/mL) or non-seed (100 mmol/L sodium acetate, pH7.0) was stereotaxically injected into left hippocampus (A: +2.5, L: 2.0, V: 1.5) (Franklin and Paxinos, The Mouse Brain in Stereotaxic Coordinates Third Edition 2007, Elsevier USA) of 3-to 4-month-old Mouse/Thy-1hTau.P301S (CBA.C57BL/6) mice [homozygous human P301S Tau transgenic mouse (C57BL/6) generated previously (Allen et al., J Neurosci. 2002; 22:9340-51)] using an UltraMicroPump III and Micro4 Controller (World Precision Instruments) at 0.5 μL/min for 6 minutes. Mice were randomly divided into groups as shown in Table 15. Anti-human Tau mouse IgG2b monoclonal antibody, clone 7G6 or mouse IgG2b isotype control antibody (clone MPC11, BioXCell) in formulation buffer (25 mmol/L Sodium phosphate, 0.15 mol/L NaCl, pH6.5)) were administered introperitoneally to reach a dose of 40 mg/kg in the groups that had received seed. The same formulation buffer was administered to the non-seed group. Dosing was performed 6-16 hours before, and 1 and 2 weeks after Tau seed injection (total 3 times). The administration volume (10 mL/kg) was calculated from the body weight before administration.

TABLE 15
Treatment Groups

| | Group | | Number of |
|---|---|---|---|
| Study | No. | Treatment | animals‡ |
| Pharmacological | 1 | Non-seed + Vehicle | 6 |
| study | 2 | Tau seed + Control IgG | 11 |
| | 3 | Tau seed + 7G6 | 11 |

“Non-seed” represents injection of solution (100 mmol/L sodium acetate, pH 7.0) into left hippocampus , and “Tau seed” represents injection of 1.5 mg/mL Tau seed solution into left hippocampus . Control IgG = Mouse IgG2b isotype control antibody, 7G6 = Anti-human tau mouse IgG2b monoclonal antibody.
‡Tissue from an additional five animals in the non-seed group and 11 animals for both treatment groups that received seed was processed by adding buffer containing sarkosyl to the tissue directly instead of RIPA buffer. These additional animals were therefore not included in the data analysis. A reduction in insoluble Tau (after extracting with buffer containing sarkosyl twice) was still observed, however, in these additional animals.

[0414] All mice were deeply anesthetized with a combination anesthetic (M/M/B: prepared with 0.9 mg/kg of medetomidine, 12.0 mg/kg of midazolam, and 15 mg/kg of butorphanol), and plasma and cerebrospinal fluid (CSF) were collected. Then, the cortex and hippocampus from both sides (ipsilateral and contralateral) were separately dissected following intracardiac perfusion with saline. Brain tissues were immediately frozen in liquid nitrogen and stored at −80° C.

[0415] Dissected brain tissues were homogenized in 19 volumes (tissue weight/volume) of extraction buffer (“RIPA buffer”) containing 50 mmol/L Tris-HCl (pH7.5) (Invitrogen), 5 mmol/L EDTA (Nippon Gene), 1 mmol/L EGTA (Nacalai Tesque), 1% NP-40 Alternative (EMD Millipore), 0.25% Sodium Deoxycholate (Bio world), 0.1 mol/L NaCl, 0.5 mmol/L PMSF (Sigma Aldrich), 1× PhosSTOP™ (Roche), and 1× Complete EDTA(−) (Roche). Homogenates were centrifuged at 163,000 g at 4° C. for 20 minutes and the pellet was resuspended in 10 volumes (tissue weight/volume) of buffer containing 10 mmol/L Tris-HCl (pH7.5), 0.5 mol/L NaCl, 1 mmol/L EGTA, 10% sucrose (Wako Pure Chemical), and 1% sarkosyl prior to sonication. Sarkosyl-treated samples were incubated at 37° C. for 60 minutes, and then centrifuged at 163,000 g at 4° C. for a further 20 minutes. Finally, 10 volumes of PBS (Gibco) was added to the pellet which was subsequently sonicated. This formed the sarkosyl-insoluble fraction.

[0416] The amount of Tau protein in the sarkosyl-insoluble fraction was quantified by Western blot analysis. Sarkosyl-insoluble fractions were solubilized in NuPAGE™ LDS sample buffer (Novex) and NuPAGE™ sample reducing agent (Invitrogen), heated at 80° C. for 10 minutes, and separated using 12.5% polyacrylamide gels (DRC). Proteins were transferred to 0.2 μm PVDF membranes (Bio-Rad) and blots were blocked in 2.5% skimmed milk (Yukijirushi) in TBS (Takara) containing 0.05% Tween (Nacalai tesque) for 1 hour at room temperature. After blocking, blots were probed with the human-specific monoclonal anti-Tau antibody HT7 (1:1000, Thermo Fisher Scientific) in blocking buffer for 1 hour at room temperature. The blots were washed in TB S-T for 30 minutes and then incubated with HRP-conjugated anti-mouse IgG (1:2000, GE healthcare) for a further 1 hour at room temperature. Secondary antibody was removed and blots were washed as described above. Tau proteins were detected by chemiluminescent horseradish peroxidase (HRP) substrate (Merck Millipore) and quantified using the Fusion FX and FusionCapt version 16.15 (Vilber-Lourmat, France). To determine the amount of Tau, serial dilutions of Tau standards derived from the originating sarkosyl-insoluble fraction of P301S spinal cord (1, 2, 5, 10, 20 Arbitrary Unit [AU], 1 AU is equivalent to the band density of human Tau protein detected by HT7 antibody in sarkosyl insoluble fraction from 7 μg of spinal cord) were loaded onto each gel. The data calculated as less than 1 AU (detection limit) was expressed as 0.5 AU.

[0417] Data are expressed as the mean±SEM. The differences in sarkosyl-insoluble Tau between the Non-seed, control IgG-treated and 7G6-treated groups were analyzed by 1-way analysis of variance (ANOVA) followed by Fisher's LSD test. A value of P<0.05 (two sided) was considered statistically significant. Statistical analyses were performed using the GraphPad Prism version 7.02 (GraphPad Software).

[0418] Results

[0419] The effect of 7G6 on sarkosyl-insoluble Tau induced by intra-hippocampal Tau seed injection was examined in both ipsilateral (injection side) and contralateral cortex and hippocampus, separately. As shown in FIGS. 30A-30D, 7G6 significantly suppressed the increase of sarcosyl-insoluble Tau in the contralateral hippocampus compared with control IgG (FIG. 30A), but showed no significant effects in other regions (FIGS. 30B, 30C, and 30D). This suggests that 7G6 was able to prevent Tau transmission in this in vivo model.

### Example 18: 7G6-HCzu25-LCzu18 Translational Biomarker Data

[0420] Male cynomolgus monkeys were treated with vehicle or 7G6-HCzu25-LCzu18 antibody (10, 30, and 100 mg/kg: 3 animals/dose) by intermittent intravenous administration once weekly for 4 weeks. MTBR-Tau (any isoform of full length or truncated Tau containing the MTBR) bound to 7G6-HCzu25-LCzu18 antibody (“Bound MTBR-Tau”) and unbound form (“Free MTBR-Tau”) in the cerebrospinal fluid (“CSF”) collected from each monkey were separated by a Protein A column and analyzed by liquid chromatography coupled with mass spectrometry (LC/MS). LC/MS analysis was performed using UltiMate™ 3000 Nano LC system coupled to Orbitrap Fusion™ Lumos™ Tribrid™ mass spectrometer (Thermo Fisher Scientific, San Jose, CA) with needle column (3 μm C18 particle, 150 mm length, 100 μm inner diameter). A spray voltage of 2000 V was applied through a metallic tee connector. The flow rate was 500 nL/min. The mobile phases consisted of (A) 0.5% acetic acid in 4% acetonitrile and (B) 0.5% acetic acid in 80% acetonitrile and a multi-step linear gradient of 1% to 1% B for min, 1% to 37% B for 15 min, 37% to 68% B for 5 min, 68% to 99% B for 1 min and 99% to 99% B for 4 min was employed to elute the analyte and then equilibrated by the initial condition, 1% B. A specific peptide containing 7G6-HCzu25-LCzu18 antibody epitope was measured by LC/MS as a proxy of MTBR-Tau. The amount of MTBR-Tau was expressed as the chromatographic peak area ratio of the specified peptide (Light) and its internal standard (Heavy), isotope-labelled peptide.

[0421] As shown in FIG. 31A, the amount of bound MTBR-Tau in CSF increased with treatment of the 7G6-HCzu25-LCzu18 antibody in a dose-dependent manner, whereas the amount of free MTBR-Tau in monkey CSF decreased also with dose-dependency (FIG. 31B). This suggests in vivo target engagement of the 7G6-HCzu25-LCzu18 antibody in monkey CSF.

[0422] 7G6-HCzu25-LCzu18 antibody was also spiked into human CSF at 10, 100, 500, 1000 or 2000 ng/mL. Then, MTBR-Tau bound by 7G6-HCzu25-LCzu18 was assayed by liquid chromatography coupled with mass spectrometry (LC/MS) in the same way as described above. As shown in FIG. 32, the amount of the bound MTBR-Tau in human CSF increased by treatment of 7G6-HCzu25-LCzu18 antibody with dose-dependency. This data also indicates target engagement of 7G6-HCzu25-LCzu18 antibody for MTBR-Tau in human CSF.

### Example 19: Measurement of Tau Uptake in CD32A Overexpressing CHO Cells

[0423] Preparation of labelled Tau monomers and fibrils. Wild type recombinant full length human 2N4R Tau aggregates were prepared from monomers as described for the P301S protein in Example 17. Prior to labelling, aggregates were sonicated to generate the fibrils used in the assay. Both Tau fibrils and monomers were fluorescently labelled using the DyLight™ 488 NETS-Ester kit (ThermoFisherScientific, Cat #46403) according to the manufacturer's instructions with minor differences between the two forms of protein: 150 μl of Tau monomer (100 μM) was mixed with 100 μL of DyLight NETS Ester solution whereas 300 μl of Tau-441 fibril (587 μg/mL) was mixed with 66 μl of DyLight NETS Ester solution. Labelling was performed at room temperature for one hour. Excess unconjugated dye was removed with Pierce™ Dye Removal Columns (ThermoFisherScientific, Cat #22858, lot #SL260099) according to the manufacturer's protocol using 125 μl of labelled Tau monomer or 122 μL of labelled fibrils. Final concentrations of labelled Tau monomers and fibrils were measured by bicinchoninic acid assay (BCA) assay, and stored at −80° C.

[0424] Cell-based assay. Frozen CHO cells stably expressing CD32a (Fc gamma RITA) were thawed rapidly in a 37° C. water bath, and placed into CHO medium (RPMI 1640 Medium with 10% fetal bovine serum, L-Glutamine, Non-Essential Amino Acids, Sodium Pyruvate, and penicillin/Streptomycin). Cells were seeded at 1×10⁴ cells/well (100 μl/well) in a 96-well assay plate (Costar, catalog no. 3603) and incubated for 24 hours at 37° C. in 5% CO₂ atmosphere. Labelled Tau monomers and fibrils were thawed on ice and diluted to concentrations of 1.5 μg/mL or 0.5 μg/mL respectively in assay buffer (RPMI 1640 media) (GIBCO, catalog no. 21875-034). Then, in a total volume of 60 μL, 7G6-HCzu25-LCzu18 antibody (final concentrations: 0.3 or 3 μg/mL), human IgG1 isotype control (BioXcell, catalog no. BE0297) (final concentration: 3 μg/mL) or vehicle (25 mM sodium phosphate buffer, pH 6.5, containing 150 mM NaCl) were added to either form of the protein and incubated at room temperature for one hour protected from light. CHO medium was removed from the plates and cells were pre-treated with 90 IA of assay buffer or a polyclonal antibody Fc receptor binding inhibitor (ThermoFisher Scientific, catalog no. 16-9161-71) diluted to 100 μg/mL also in assay buffer. Cells were then incubated for 30 min at 37° C. in 5% CO₂ atmosphere. Next, relevant wells received 10⁴ of labelled Tau monomer or Tau fibril mixtures with or without antibody and plates were incubated for a further 60 minutes again at 37° C. in a 5% CO₂ atmosphere. Each treatment was performed in quintuplicate wells. Six independent experiments were performed for Tau monomer uptake assays and five independent experiments were completed to measure Tau fibril uptake.

[0425] Cell fixation and staining. Following the final incubation period, cells were fixed in 4% paraformaldehyde for 30 min at room temperature. Each well was then washed with 100 μL of water and replaced by 70 μL of Hoechst staining buffer (Triton X-100 solution (final concentration: 0.2%) and Hoechst solution (final concentration: 0.02%)). The plate was covered and incubated for 30 minutes at room temperature with protection from light. The staining buffer was then removed and each well was washed twice more with 100 lit of water.

[0426] Cell imaging. Fluorescence images of each well were obtained using a Cellomics high content imaging system (ThermoFisherScientific). The total intensity of labelled Tau and the number of Hoechst positive cells in each well were recorded and analysed using the Thermo Scientific HCS Studio (ThermoFisherScientific) software.

[0427] Data Analysis. The mean of total intensity of Tau signal per cell was measured and the Tau uptake effect was calculated using the following formulas in the TIBCO spotfire software program:

Tau uptake effect (% of control)=T₁/C₁×100, where
[0428] T₁: Total intensity of DyLight 488 NHS conjugated Tau signal per cells in the antibody treated sample, and
[0429] C₁: Total intensity of DyLight 488 NHS conjugated Tau signal per cells in the 7G6-HCzu25-LCzu18 (30 μg/mL) treated sample.

[0430] Statistical Analysis. Data are expressed as the mean±SEM. Statistical analyses were performed using ONE-Way ANOVA test in the GraphPad Prism version 7.02 (GraphPad Software) **** p<0.0001, ** p<0.01, * p<0.05.

[0431] FIGS. 33A and 33B show the efficacy of Tau monomer or fibril uptake, respectively, in CHO cells overexpressing CD32A. 7G6-HCzu25-LCzu18 antibody (3 μg/mL) significantly increased Tau monomer uptake compared to human IgG1 control (3 μg/mL) (FIG. 33A). Likewise, 7G6-HCzu25-LCzu18 antibody (0.3 and 3 μg/mL) also significantly increased Tau fibril uptake compared to human IgG1 control (3 μg/mL) (FIG. 33B). In both cases, FcR inhibitor treatment significantly blocked the effect of 7G6-HCzu25-LCzu18 antibody-induced Tau uptake in this cell assay system.

The application's sequence listing, which the Patent Office published only in electronic form, follows.

SEQUENCE LISTING (1207 sequences)

SEQ ID NO: 1 - protein, 15 aa, synthetic construct
  REGION 1..15: note = Description of Artificial Sequence: Synthetic peptide
GSGSGSGMAEPRQEF

SEQ ID NO: 2 - protein, 15 aa, synthetic construct
  REGION 1..15: note = Description of Artificial Sequence: Synthetic peptide
QEFEVMEDHAGTYGL

SEQ ID NO: 3 - protein, 15 aa, synthetic construct
  REGION 1..15: note = Description of Artificial Sequence: Synthetic peptide
YGLGDRKDQGGYTMH

SEQ ID NO: 4 - protein, 15 aa, synthetic construct
  REGION 1..15: note = Description of Artificial Sequence: Synthetic peptide
TMHQDQEGDTDAGLK

SEQ ID NO: 5 - protein, 15 aa, synthetic construct
  REGION 1..15: note = Description of Artificial Sequence: Synthetic peptide
GLKESPLQTPTEDGS

SEQ ID NO: 6 - protein, 15 aa, synthetic construct
  REGION 1..15: note = Description of Artificial Sequence: Synthetic peptide
DGSEEPGSETSDAKS

SEQ ID NO: 7 - protein, 15 aa, synthetic construct
  REGION 1..15: note = Description of Artificial Sequence: Synthetic peptide
AKSTPTAEDVTAPLV

SEQ ID NO: 8 - protein, 15 aa, synthetic construct
  REGION 1..15: note = Description of Artificial Sequence: Synthetic peptide
PLVDEGAPGKQAAAQ

SEQ ID NO: 9 - protein, 15 aa, synthetic construct
  REGION 1..15: note = Description of Artificial Sequence: Synthetic peptide
AAQPHTEIPEGTTAE

SEQ ID NO: 10 - protein, 15 aa, synthetic construct
  REGION 1..15: note = Description of Artificial Sequence: Synthetic peptide
TAEEAGIGDTPSLED

SEQ ID NO: 11 - protein, 15 aa, synthetic construct
  REGION 1..15: note = Description of Artificial Sequence: Synthetic peptide
LEDEAAGHVTQARMV

SEQ ID NO: 12 - protein, 15 aa, synthetic construct
  REGION 1..15: note = Description of Artificial Sequence: Synthetic peptide
RMVSKSKDGTGSDDK

SEQ ID NO: 13 - protein, 15 aa, synthetic construct
  REGION 1..15: note = Description of Artificial Sequence: Synthetic peptide
DDKKAKGADGKTKIA

SEQ ID NO: 14 - protein, 15 aa, synthetic construct
  REGION 1..15: note = Description of Artificial Sequence: Synthetic peptide
KIATPRGAAPPGQKG

SEQ ID NO: 15 - protein, 15 aa, synthetic construct
  REGION 1..15: note = Description of Artificial Sequence: Synthetic peptide
QKGQANATRIPAKTP

SEQ ID NO: 16 - protein, 15 aa, synthetic construct
  REGION 1..15: note = Description of Artificial Sequence: Synthetic peptide
KTPPAPKTPPSSGEP

SEQ ID NO: 17 - protein, 15 aa, synthetic construct
  REGION 1..15: note = Description of Artificial Sequence: Synthetic peptide
GEPPKSGDRSGYSSP

SEQ ID NO: 18 - protein, 15 aa, synthetic construct
  REGION 1..15: note = Description of Artificial Sequence: Synthetic peptide
SSPGSPGTPGSRSRT

SEQ ID NO: 19 - protein, 15 aa, synthetic construct
  REGION 1..15: note = Description of Artificial Sequence: Synthetic peptide
SRTPSLPTPPTREPK

SEQ ID NO: 20 - protein, 15 aa, synthetic construct
  REGION 1..15: note = Description of Artificial Sequence: Synthetic peptide
EPKKVAVVRTPPKSP

SEQ ID NO: 21 - protein, 15 aa, synthetic construct
  REGION 1..15: note = Description of Artificial Sequence: Synthetic peptide
KSPSSAKSRLQTAPV

SEQ ID NO: 22 - protein, 15 aa, synthetic construct
  REGION 1..15: note = Description of Artificial Sequence: Synthetic peptide
APVPMPDLKNVKSKI

SEQ ID NO: 23 - protein, 15 aa, synthetic construct
  REGION 1..15: note = Description of Artificial Sequence: Synthetic peptide
SKIGSTENLKHQPGG

SEQ ID NO: 24 - protein, 15 aa, synthetic construct
  REGION 1..15: note = Description of Artificial Sequence: Synthetic peptide
PGGGKVQIINKKLDL

SEQ ID NO: 25 - protein, 15 aa, synthetic construct
  REGION 1..15: note = Description of Artificial Sequence: Synthetic peptide
LDLSNVQSKCGSKDN

SEQ ID NO: 26 - protein, 15 aa, synthetic construct
  REGION 1..15: note = Description of Artificial Sequence: Synthetic peptide
KDNIKHVPGGGSVQI

SEQ ID NO: 27 - protein, 15 aa, synthetic construct
  REGION 1..15: note = Description of Artificial Sequence: Synthetic peptide
VQIVYKPVDLSKVTS

SEQ ID NO: 28 - protein, 15 aa, synthetic construct
  REGION 1..15: note = Description of Artificial Sequence: Synthetic peptide
VTSKCGSLGNIHHKP

SEQ ID NO: 29 - protein, 15 aa, synthetic construct
  REGION 1..15: note = Description of Artificial Sequence: Synthetic peptide
HKPGGGQVEVKSEKL

SEQ ID NO: 30 - protein, 15 aa, synthetic construct
  REGION 1..15: note = Description of Artificial Sequence: Synthetic peptide
EKLDFKDRVQSKIGS

SEQ ID NO: 31 - protein, 15 aa, synthetic construct
  REGION 1..15: note = Description of Artificial Sequence: Synthetic peptide
IGSLDNITHVPGGGN

SEQ ID NO: 32 - protein, 15 aa, synthetic construct
  REGION 1..15: note = Description of Artificial Sequence: Synthetic peptide
GGNKKIETHKLTFRE

SEQ ID NO: 33 - protein, 15 aa, synthetic construct
  REGION 1..15: note = Description of Artificial Sequence: Synthetic peptide
FRENAKAKTDHGAEI

SEQ ID NO: 34 - protein, 15 aa, synthetic construct
  REGION 1..15: note = Description of Artificial Sequence: Synthetic peptide
AEIVYKSPVVSGDTS

SEQ ID NO: 35 - protein, 15 aa, synthetic construct
  REGION 1..15: note = Description of Artificial Sequence: Synthetic peptide
DTSPRHLSNVSSTGS

SEQ ID NO: 36 - protein, 15 aa, synthetic construct
  REGION 1..15: note = Description of Artificial Sequence: Synthetic peptide
TGSIDMVDSPQLATL

SEQ ID NO: 37 - protein, 15 aa, synthetic construct
  REGION 1..15: note = Description of Artificial Sequence: Synthetic peptide
ATLADEVSASLAKQG

SEQ ID NO: 38 - protein, 15 aa, synthetic construct
  REGION 1..15: note = Description of Artificial Sequence: Synthetic peptide
KDNIKHVPGGGSVQA

SEQ ID NO: 39 - protein, 15 aa, synthetic construct
  REGION 1..15: note = Description of Artificial Sequence: Synthetic peptide
KDNIKHVPGGGSVQK

SEQ ID NO: 40 - protein, 15 aa, synthetic construct
  REGION 1..15: note = Description of Artificial Sequence: Synthetic peptide
KDNIKHVPGGGSVQS

SEQ ID NO: 41 - protein, 15 aa, synthetic construct
  REGION 1..15: note = Description of Artificial Sequence: Synthetic peptide
KDNIKHVPGGGSVDI

SEQ ID NO: 42 - protein, 15 aa, synthetic construct
  REGION 1..15: note = Description of Artificial Sequence: Synthetic peptide
KDNIKHVPGGGSVLI

SEQ ID NO: 43 - protein, 15 aa, synthetic construct
  REGION 1..15: note = Description of Artificial Sequence: Synthetic peptide
KDNIKHVPGGGSVVI

SEQ ID NO: 44 - protein, 15 aa, synthetic construct
  REGION 1..15: note = Description of Artificial Sequence: Synthetic peptide
KDNIKHVPGGGSFQI

SEQ ID NO: 45 - protein, 15 aa, synthetic construct
  REGION 1..15: note = Description of Artificial Sequence: Synthetic peptide
KDNIKHVPGGGSNQI

SEQ ID NO: 46 - protein, 15 aa, synthetic construct
  REGION 1..15: note = Description of Artificial Sequence: Synthetic peptide
KDNIKHVPGGGSYQI

SEQ ID NO: 47 - protein, 15 aa, synthetic construct
  REGION 1..15: note = Description of Artificial Sequence: Synthetic peptide
KDNIKHVPGGGHVQI

SEQ ID NO: 48 - protein, 15 aa, synthetic construct
  REGION 1..15: note = Description of Artificial Sequence: Synthetic peptide
KDNIKHVPGGGQVQI

SEQ ID NO: 49 - protein, 15 aa, synthetic construct
  REGION 1..15: note = Description of Artificial Sequence: Synthetic peptide
KDNIKHVPGGCSVQI

SEQ ID NO: 50 - protein, 15 aa, synthetic construct
  REGION 1..15: note = Description of Artificial Sequence: Synthetic peptide
KDNIKHVPGGLSVQI

SEQ ID NO: 51 - protein, 15 aa, synthetic construct
  REGION 1..15: note = Description of Artificial Sequence: Synthetic peptide
KDNIKHVPGGTSVQI

SEQ ID NO: 52 - protein, 15 aa, synthetic construct
  REGION 1..15: note = Description of Artificial Sequence: Synthetic peptide
KDNIKHVPGEGSVQI

SEQ ID NO: 53 - protein, 15 aa, synthetic construct
  REGION 1..15: note = Description of Artificial Sequence: Synthetic peptide
KDNIKHVPGNGSVQI

SEQ ID NO: 54 - protein, 15 aa, synthetic construct
  REGION 1..15: note = Description of Artificial Sequence: Synthetic peptide
KDNIKHVPGWGSVQI

SEQ ID NO: 55 - protein, 15 aa, synthetic construct
  REGION 1..15: note = Description of Artificial Sequence: Synthetic peptide
KDNIKHVPHGGSVQI

SEQ ID NO: 56 - protein, 15 aa, synthetic construct
  REGION 1..15: note = Description of Artificial Sequence: Synthetic peptide
KDNIKHVPQGGSVQI

SEQ ID NO: 57 - protein, 15 aa, synthetic construct
  REGION 1..15: note = Description of Artificial Sequence: Synthetic peptide
KDNIKHVAGGGSVQI

SEQ ID NO: 58 - protein, 15 aa, synthetic construct
  REGION 1..15: note = Description of Artificial Sequence: Synthetic peptide
KDNIKHVIGGGSVQI

SEQ ID NO: 59 - protein, 15 aa, synthetic construct
  REGION 1..15: note = Description of Artificial Sequence: Synthetic peptide
KDNIKHVSGGGSVQI

SEQ ID NO: 60 - protein, 15 aa, synthetic construct
  REGION 1..15: note = Description of Artificial Sequence: Synthetic peptide
KDNIKHDPGGGSVQI

SEQ ID NO: 61 - protein, 15 aa, synthetic construct
  REGION 1..15: note = Description of Artificial Sequence: Synthetic peptide
KDNIKHLPGGGSVQI

SEQ ID NO: 62 - protein, 15 aa, synthetic construct
  REGION 1..15: note = Description of Artificial Sequence: Synthetic peptide
KDNIKHTPGGGSVQI

SEQ ID NO: 63 - protein, 15 aa, synthetic construct
  REGION 1..15: note = Description of Artificial Sequence: Synthetic peptide
KDNIKFVPGGGSVQI

SEQ ID NO: 64 - protein, 15 aa, synthetic construct
  REGION 1..15: note = Description of Artificial Sequence: Synthetic peptide
KDNIKPVPGGGSVQI

SEQ ID NO: 65 - protein, 15 aa, synthetic construct
  REGION 1..15: note = Description of Artificial Sequence: Synthetic peptide
KDNIKYVPGGGSVQI

SEQ ID NO: 66 - protein, 15 aa, synthetic construct
  REGION 1..15: note = Description of Artificial Sequence: Synthetic peptide
KDNIHHVPGGGSVQI

SEQ ID NO: 67 - protein, 15 aa, synthetic construct
  REGION 1..15: note = Description of Artificial Sequence: Synthetic peptide
KDNIRHVPGGGSVQI

SEQ ID NO: 68 - protein, 15 aa, synthetic construct
  REGION 1..15: note = Description of Artificial Sequence: Synthetic peptide
KDNCKHVPGGGSVQI

SEQ ID NO: 69 - protein, 15 aa, synthetic construct
  REGION 1..15: note = Description of Artificial Sequence: Synthetic peptide
KDNLKHVPGGGSVQI

SEQ ID NO: 70 - protein, 15 aa, synthetic construct
  REGION 1..15: note = Description of Artificial Sequence: Synthetic peptide
KDNTKHVPGGGSVQI

SEQ ID NO: 71 - protein, 15 aa, synthetic construct
  REGION 1..15: note = Description of Artificial Sequence: Synthetic peptide
KDEIKHVPGGGSVQI

SEQ ID NO: 72 - protein, 15 aa, synthetic construct
  REGION 1..15: note = Description of Artificial Sequence: Synthetic peptide
KDMIKHVPGGGSVQI

SEQ ID NO: 73 - protein, 15 aa, synthetic construct
  REGION 1..15: note = Description of Artificial Sequence: Synthetic peptide
KDWIKHVPGGGSVQI

SEQ ID NO: 74 - protein, 15 aa, synthetic construct
  REGION 1..15: note = Description of Artificial Sequence: Synthetic peptide
KGNIKHVPGGGSVQI

SEQ ID NO: 75 - protein, 15 aa, synthetic construct
  REGION 1..15: note = Description of Artificial Sequence: Synthetic peptide
KPNIKHVPGGGSVQI

SEQ ID NO: 76 - protein, 15 aa, synthetic construct
  REGION 1..15: note = Description of Artificial Sequence: Synthetic peptide
KYNIKHVPGGGSVQI

SEQ ID NO: 77 - protein, 15 aa, synthetic construct
  REGION 1..15: note = Description of Artificial Sequence: Synthetic peptide
HDNIKHVPGGGSVQI

SEQ ID NO: 78 - protein, 15 aa, synthetic construct
  REGION 1..15: note = Description of Artificial Sequence: Synthetic peptide
RDNIKHVPGGGSVQI

SEQ ID NO: 79 - protein, 5 aa, Homo sapiens
HVPGG

SEQ ID NO: 80 - protein, 9 aa, synthetic construct
  REGION 1..9: note = Description of Artificial Sequence: Synthetic peptide
VQLVQSGAE

SEQ ID NO: 81 - protein, 9 aa, synthetic construct
  REGION 1..9: note = Description of Artificial Sequence: Synthetic peptide
LVQSGAEVK

SEQ ID NO: 82 - protein, 9 aa, synthetic construct
  REGION 1..9: note = Description of Artificial Sequence: Synthetic peptide
VKVSCKASG

SEQ ID NO: 83 - protein, 9 aa, synthetic construct
  REGION 1..9: note = Description of Artificial Sequence: Synthetic peptide
YWITWVRQA

SEQ ID NO: 84 - protein, 9 aa, synthetic construct
  REGION 1..9: note = Description of Artificial Sequence: Synthetic peptide
WVRQAPGQG

SEQ ID NO: 85 - protein, 9 aa, synthetic construct
  REGION 1..9: note = Description of Artificial Sequence: Synthetic peptide
VRQAPGQGL

SEQ ID NO: 86 - protein, 9 aa, synthetic construct
  REGION 1..9: note = Description of Artificial Sequence: Synthetic peptide
WMGDIYPGS

SEQ ID NO: 87 - protein, 9 aa, synthetic construct
  REGION 1..9: note = Description of Artificial Sequence: Synthetic peptide
ISNYAQKFQ

SEQ ID NO: 88 - protein, 9 aa, synthetic construct
  REGION 1..9: note = Description of Artificial Sequence: Synthetic peptide
FQGRVTMTR

SEQ ID NO: 89 - protein, 9 aa, synthetic construct
  REGION 1..9: note = Description of Artificial Sequence: Synthetic peptide
MTRDTSTST

SEQ ID NO: 90 - protein, 9 aa, synthetic construct
  REGION 1..9: note = Description of Artificial Sequence: Synthetic peptide
VYMELSSLR

SEQ ID NO: 91 - protein, 9 aa, synthetic construct
  REGION 1..9: note = Description of Artificial Sequence: Synthetic peptide
YMELSSLRS

SEQ ID NO: 92 - protein, 9 aa, synthetic construct
  REGION 1..9: note = Description of Artificial Sequence: Synthetic peptide
LRSEDTAVY

SEQ ID NO: 93 - protein, 9 aa, synthetic construct
  REGION 1..9: note = Description of Artificial Sequence: Synthetic peptide
VYYCAREDG

SEQ ID NO: 94 - protein, 9 aa, synthetic construct
  REGION 1..9: note = Description of Artificial Sequence: Synthetic peptide
YWGQGTLVT

SEQ ID NO: 95 - protein, 9 aa, synthetic construct
  REGION 1..9: note = Description of Artificial Sequence: Synthetic peptide
VQLLESGGG

SEQ ID NO: 96 - protein, 9 aa, synthetic construct
  REGION 1..9: note = Description of Artificial Sequence: Synthetic peptide
VQPGGSLRL

SEQ ID NO: 97 - protein, 9 aa, synthetic construct
  REGION 1..9: note = Description of Artificial Sequence: Synthetic peptide
LRLSCAASG

SEQ ID NO: 98 - protein, 9 aa, synthetic construct
  REGION 1..9: note = Description of Artificial Sequence: Synthetic peptide
YWITWVRQA

SEQ ID NO: 99 - protein, 9 aa, synthetic construct
  REGION 1..9: note = Description of Artificial Sequence: Synthetic peptide
WVRQAPGKG

SEQ ID NO: 100 - protein, 9 aa, synthetic construct
  REGION 1..9: note = Description of Artificial Sequence: Synthetic peptide
VRQAPGKGL

SEQ ID NO: 101 - protein, 9 aa, synthetic construct
  REGION 1..9: note = Description of Artificial Sequence: Synthetic peptide
WVSDIYPGS

SEQ ID NO: 102 - protein, 9 aa, synthetic construct
  REGION 1..9: note = Description of Artificial Sequence: Synthetic peptide
YNEKFKSRF

SEQ ID NO: 103 - protein, 9 aa, synthetic construct
  REGION 1..9: note = Description of Artificial Sequence: Synthetic peptide
FKSRFTISV

SEQ ID NO: 104 - protein, 9 aa, synthetic construct
  REGION 1..9: note = Description of Artificial Sequence: Synthetic peptide
FTISVDNSK

SEQ ID NO: 105 - protein, 9 aa, synthetic construct
  REGION 1..9: note = Description of Artificial Sequence: Synthetic peptide
LYLQMNSLR

SEQ ID NO: 106 - protein, 9 aa, synthetic construct
  REGION 1..9: note = Description of Artificial Sequence: Synthetic peptide
YLQMNSLRA

SEQ ID NO: 107 - protein, 9 aa, synthetic construct
  REGION 1..9: note = Description of Artificial Sequence: Synthetic peptide
LQMNSLRAE

SEQ ID NO: 108 - protein, 9 aa, synthetic construct
  REGION 1..9: note = Description of Artificial Sequence: Synthetic peptide
MNSLRAEDT

SEQ ID NO: 109 - protein, 9 aa, synthetic construct
  REGION 1..9: note = Description of Artificial Sequence: Synthetic peptide
LRAEDTAVY

SEQ ID NO: 110 - protein, 9 aa, synthetic construct
  REGION 1..9: note = Description of Artificial Sequence: Synthetic peptide
VYYCAREDG

SEQ ID NO: 111 - protein, 9 aa, synthetic construct
  REGION 1..9: note = Description of Artificial Sequence: Synthetic peptide
YWGQGTLVT

SEQ ID NO: 112 - protein, 9 aa, synthetic construct
  REGION 1..9: note = Description of Artificial Sequence: Synthetic peptide
VVMTQSPLS

SEQ ID NO: 113 - protein, 9 aa, synthetic construct
  REGION 1..9: note = Description of Artificial Sequence: Synthetic peptide
VMTQSPLSL

SEQ ID NO: 114 - protein, 9 aa, synthetic construct
  REGION 1..9: note = Description of Artificial Sequence: Synthetic peptide
LSLPVTLGQ

SEQ ID NO: 115 - protein, 9 aa, synthetic construct
  REGION 1..9: note = Description of Artificial Sequence: Synthetic peptide
VTLGQPASI

SEQ ID NO: 116 - protein, 9 aa, synthetic construct
  REGION 1..9: note = Description of Artificial Sequence: Synthetic peptide
ILHSNGNTY

SEQ ID NO: 117 - protein, 9 aa, synthetic construct
  REGION 1..9: note = Description of Artificial Sequence: Synthetic peptide
LHSNGNTYL

SEQ ID NO: 118 - protein, 9 aa, synthetic construct
  REGION 1..9: note = Description of Artificial Sequence: Synthetic peptide
WYQQRPGQS

SEQ ID NO: 119 - protein, 9 aa, synthetic construct
  REGION 1..9: note = Description of Artificial Sequence: Synthetic peptide
LLISKVSNR

SEQ ID NO: 120 - protein, 9 aa, synthetic construct
  REGION 1..9: note = Description of Artificial Sequence: Synthetic peptide
LISKVSNRF

SEQ ID NO: 121 - protein, 9 aa, synthetic construct
  REGION 1..9: note = Description of Artificial Sequence: Synthetic peptide
FTLKISRVE

SEQ ID NO: 122 - protein, 9 aa, synthetic construct
  REGION 1..9: note = Description of Artificial Sequence: Synthetic peptide
LKISRVEAE

SEQ ID NO: 123 - protein, 9 aa, synthetic construct
  REGION 1..9: note = Description of Artificial Sequence: Synthetic peptide
ISRVEAEDV

SEQ ID NO: 124 - protein, 9 aa, synthetic construct
  REGION 1..9: note = Description of Artificial Sequence: Synthetic peptide
VGVYYCFQG

SEQ ID NO: 125 - protein, 9 aa, synthetic construct
  REGION 1..9: note = Description of Artificial Sequence: Synthetic peptide
VYYCFQGSH

SEQ ID NO: 126 - protein, 9 aa, synthetic construct
  REGION 1..9: note = Description of Artificial Sequence: Synthetic peptide
YYCFQGSHV

SEQ ID NO: 127 - protein, 9 aa, synthetic construct
  REGION 1..9: note = Description of Artificial Sequence: Synthetic peptide
YCFQGSHVP

SEQ ID NO: 128 - protein, 9 aa, synthetic construct
  REGION 1..9: note = Description of Artificial Sequence: Synthetic peptide
FQGSHVPFT

SEQ ID NO: 129 - protein, 9 aa, synthetic construct
  REGION 1..9: note = Description of Artificial Sequence: Synthetic peptide
FTFGQGTKL

SEQ ID NO: 130 - protein, 9 aa, synthetic construct
  REGION 1..9: note = Description of Artificial Sequence: Synthetic peptide
FGQGTKLEI

SEQ ID NO: 131 - protein, 9 aa, synthetic construct
  REGION 1..9: note = Description of Artificial Sequence: Synthetic peptide
VVMTQSPLS

SEQ ID NO: 132 - protein, 9 aa, synthetic construct
  REGION 1..9: note = Description of Artificial Sequence: Synthetic peptide
VMTQSPLSL

SEQ ID NO: 133 - protein, 9 aa, synthetic construct
  REGION 1..9: note = Description of Artificial Sequence: Synthetic peptide
LSLPVTLGQ

SEQ ID NO: 134 - protein, 9 aa, synthetic construct
  REGION 1..9: note = Description of Artificial Sequence: Synthetic peptide
VTLGQPASI

SEQ ID NO: 135 - protein, 9 aa, synthetic construct
  REGION 1..9: note = Description of Artificial Sequence: Synthetic peptide
ILHSNGNTY

SEQ ID NO: 136 - protein, 9 aa, synthetic construct
  REGION 1..9: note = Description of Artificial Sequence: Synthetic peptide
LHSNGNTYL

SEQ ID NO: 137 - protein, 9 aa, synthetic construct
  REGION 1..9: note = Description of Artificial Sequence: Synthetic peptide
LEWFQQRPG

SEQ ID NO: 138 - protein, 9 aa, synthetic construct
  REGION 1..9: note = Description of Artificial Sequence: Synthetic peptide
WFQQRPGQS

SEQ ID NO: 139 - protein, 9 aa, synthetic construct
  REGION 1..9: note = Description of Artificial Sequence: Synthetic peptide
LLISKVSNR

SEQ ID NO: 140 - protein, 9 aa, synthetic construct
  REGION 1..9: note = Description of Artificial Sequence: Synthetic peptide
LISKVSNRF

SEQ ID NO: 141 - protein, 9 aa, synthetic construct
  REGION 1..9: note = Description of Artificial Sequence: Synthetic peptide
FTLKISRVE

SEQ ID NO: 142 - protein, 9 aa, synthetic construct
  REGION 1..9: note = Description of Artificial Sequence: Synthetic peptide
LKISRVEAE

SEQ ID NO: 143 - protein, 9 aa, synthetic construct
  REGION 1..9: note = Description of Artificial Sequence: Synthetic peptide
ISRVEAEDV

SEQ ID NO: 144 - protein, 9 aa, synthetic construct
  REGION 1..9: note = Description of Artificial Sequence: Synthetic peptide
VGVYYCFQG

SEQ ID NO: 145 - protein, 9 aa, synthetic construct
  REGION 1..9: note = Description of Artificial Sequence: Synthetic peptide
VYYCFQGSH

SEQ ID NO: 146 - protein, 9 aa, synthetic construct
  REGION 1..9: note = Description of Artificial Sequence: Synthetic peptide
YYCFQGSHV

SEQ ID NO: 147 - protein, 9 aa, synthetic construct
  REGION 1..9: note = Description of Artificial Sequence: Synthetic peptide
YCFQGSHVP

SEQ ID NO: 148 - protein, 9 aa, synthetic construct
  REGION 1..9: note = Description of Artificial Sequence: Synthetic peptide
FQGSHVPFT

SEQ ID NO: 149 - protein, 9 aa, synthetic construct
  REGION 1..9: note = Description of Artificial Sequence: Synthetic peptide
FTFGQGTKL

SEQ ID NO: 150 - protein, 9 aa, synthetic construct
  REGION 1..9: note = Description of Artificial Sequence: Synthetic peptide
FGQGTKLEI

SEQ ID NO: 151 - protein, 9 aa, synthetic construct
  REGION 1..9: note = Description of Artificial Sequence: Synthetic peptide
VQMTQSPSS

SEQ ID NO: 152 - protein, 9 aa, synthetic construct
  REGION 1..9: note = Description of Artificial Sequence: Synthetic peptide
MTQSPSSLS

SEQ ID NO: 153 - protein, 9 aa, synthetic construct
  REGION 1..9: note = Description of Artificial Sequence: Synthetic peptide
ILHSNGNTY

SEQ ID NO: 154 - protein, 9 aa, synthetic construct
  REGION 1..9: note = Description of Artificial Sequence: Synthetic peptide
LHSNGNTYL

SEQ ID NO: 155 - protein, 9 aa, synthetic construct
  REGION 1..9: note = Description of Artificial Sequence: Synthetic peptide
WYQQKPGKA

SEQ ID NO: 156 - protein, 9 aa, synthetic construct
  REGION 1..9: note = Description of Artificial Sequence: Synthetic peptide
LLISKVSNR

SEQ ID NO: 157 - protein, 9 aa, synthetic construct
  REGION 1..9: note = Description of Artificial Sequence: Synthetic peptide
LISKVSNRF

SEQ ID NO: 158 - protein, 9 aa, synthetic construct
  REGION 1..9: note = Description of Artificial Sequence: Synthetic peptide
FSGVPSRFS

SEQ ID NO: 159 - protein, 9 aa, synthetic construct
  REGION 1..9: note = Description of Artificial Sequence: Synthetic peptide
FTLTISSLQ

SEQ ID NO: 160 - protein, 9 aa, synthetic construct
  REGION 1..9: note = Description of Artificial Sequence: Synthetic peptide
FATYYCFQG

SEQ ID NO: 161 - protein, 9 aa, synthetic construct
  REGION 1..9: note = Description of Artificial Sequence: Synthetic peptide
YYCFQGSHV

SEQ ID NO: 162 - protein, 9 aa, synthetic construct
  REGION 1..9: note = Description of Artificial Sequence: Synthetic peptide
YCFQGSHVP

SEQ ID NO: 163 - protein, 9 aa, synthetic construct
  REGION 1..9: note = Description of Artificial Sequence: Synthetic peptide
FQGSHVPFT

SEQ ID NO: 164 - protein, 9 aa, synthetic construct
  REGION 1..9: note = Description of Artificial Sequence: Synthetic peptide
FTFGQGTKL

SEQ ID NO: 165 - protein, 9 aa, synthetic construct
  REGION 1..9: note = Description of Artificial Sequence: Synthetic peptide
FGQGTKLEI

SEQ ID NO: 166 - protein, 9 aa, synthetic construct
  REGION 1..9: note = Description of Artificial Sequence: Synthetic peptide
IQMTQSPSS

SEQ ID NO: 167 - protein, 9 aa, synthetic construct
  REGION 1..9: note = Description of Artificial Sequence: Synthetic peptide
MTQSPSSLS

SEQ ID NO: 168 - protein, 9 aa, synthetic construct
  REGION 1..9: note = Description of Artificial Sequence: Synthetic peptide
ILHSNGNTY

SEQ ID NO: 169 - protein, 9 aa, synthetic construct
  REGION 1..9: note = Description of Artificial Sequence: Synthetic peptide
LHSNGNTYL

SEQ ID NO: 170 - protein, 9 aa, synthetic construct
  REGION 1..9: note = Description of Artificial Sequence: Synthetic peptide
WYQQKPGKA

SEQ ID NO: 171 - protein, 9 aa, synthetic construct
  REGION 1..9: note = Description of Artificial Sequence: Synthetic peptide
LLISKVSNR

SEQ ID NO: 172 - protein, 9 aa, synthetic construct
  REGION 1..9: note = Description of Artificial Sequence: Synthetic peptide
LISKVSNRF

SEQ ID NO: 173 - protein, 9 aa, synthetic construct
  REGION 1..9: note = Description of Artificial Sequence: Synthetic peptide
FSGVPSRFS

SEQ ID NO: 174 - protein, 9 aa, synthetic construct
  REGION 1..9: note = Description of Artificial Sequence: Synthetic peptide
FTLTISSLQ

SEQ ID NO: 175 - protein, 9 aa, synthetic construct
  REGION 1..9: note = Description of Artificial Sequence: Synthetic peptide
FATYYCFQG

SEQ ID NO: 176 - protein, 9 aa, synthetic construct
  REGION 1..9: note = Description of Artificial Sequence: Synthetic peptide
YYCFQGSHV

SEQ ID NO: 177 - protein, 9 aa, synthetic construct
  REGION 1..9: note = Description of Artificial Sequence: Synthetic peptide
YCFQGSHVP

SEQ ID NO: 178 - protein, 9 aa, synthetic construct
  REGION 1..9: note = Description of Artificial Sequence: Synthetic peptide
FQGSHVPFT

SEQ ID NO: 179 - protein, 9 aa, synthetic construct
  REGION 1..9: note = Description of Artificial Sequence: Synthetic peptide
FTFGQGTKL

SEQ ID NO: 180 - protein, 9 aa, synthetic construct
  REGION 1..9: note = Description of Artificial Sequence: Synthetic peptide
FGQGTKLEI

SEQ ID NO: 181 - protein, 441 aa, Homo sapiens
MAEPRQEFEVMEDHAGTYGLGDRKDQGGYTMHQDQEGDTDAGLKESPLQTPTEDGSEEPGSETSDAKSTPTAEDVTAPLVDEGAPGKQAAAQPHTEIPEGTTAEEAGIGDTPSLEDEAAGHVTQARMVSKSKDGTGSDDKKAKGADGKTKIATPRGAAPPGQKGQANATRIPAKTPPAPKTPPSSGEPPKSGDRSGYSSPGSPGTPGSRSRTPSLPTPPTREPKKVAVVRTPPKSPSSAKSRLQTAPVPMPDLKNVKSKIGSTENLKHQPGGGKVQIINKKLDLSNVQSKCGSKDNIKHVPGGGSVQIVYKPVDLSKVTSKCGSLGNIHHKPGGGQVEVKSEKLDFKDRVQSKIGSLDNITHVPGGGNKKIETHKLTFRENAKAKTDHGAEIVYKSPVVSGDTSPRHLSNVSSTGSIDMVDSPQLATLADEVSASLAKQGL

SEQ ID NO: 182 - protein, 5 aa, Homo sapiens
HKPGG

SEQ ID NO: 183 - protein, 5 aa, Homo sapiens
HQPGG

SEQ ID NO: 184 - protein, 5 aa, Homo sapiens
HVSGG

SEQ ID NO: 185 - protein, 5 aa, Homo sapiens
HVLGG

SEQ ID NO: 186 - protein, 20 aa, synthetic construct
  REGION 1..20: note = Description of Artificial Sequence: Synthetic peptide
CNIKHVPGGGSVQIVYKPVD

SEQ ID NO: 187 - protein, 6 aa, synthetic construct
  REGION 1..6: note = Description of Artificial Sequence: Synthetic peptide
VQIVYK

SEQ ID NO: 188 - protein, 7 aa, synthetic construct
  REGION 1..7: note = Description of Artificial Sequence: Synthetic peptide
GSGSGSG

SEQ ID NO: 189 - protein, 10 aa, Influenza A virus
YPYDVPDYAG

SEQ ID NO: 190 - DNA, 509 bp, synthetic construct
  misc_feature 1..509: note = Description of Artificial Sequence: Synthetic polynucleotide
  source 1..509: mol_type = other DNA
atgggatggagctgtatcatcctcattttggtagcagcagctacaggtgtccactcccaggtccaactgctgcagcctggggctgagcttgtgaagcctggggcttcagtaataatgtcctgcaaggcttctggctacaccttcaccacctactggataacctgggtgaagcagaggcctggacaaggccttgagtggattggagatatttatcctggtagtagtatttgtaactacaatgagaagttcaagagcaaggccacactgactgtagacacatcctccagcacagcctacatgcagctcaacagcctgacatctgaggactctgcggtctattactgtgcaagggaggatggttacgacgcctggtttgcttactggggccaagggactctggtcactgtctccgcagccaaaacaacacccccatcagtctatccactggcccctgggtgtggagatacaactggttcctctgtgactctgggatgcctggtcaagggcta

SEQ ID NO: 191 - DNA, 452 bp, synthetic construct
  misc_feature 1..452: note = Description of Artificial Sequence: Synthetic polynucleotide
  source 1..452: mol_type = other DNA
caggtccaactgctgcagcctggggctgagcttgtgaagcctggggcttcagtaataatgtcctgcaaggcttctggctacaccttcaccacctactggataacctgggtgaagcagaggcctggacaaggccttgagtggattggagatatttatcctggtagtagtatttgtaactacaatgagaagttcaagagcaaggccacactgactgtagacacatcctccagcacagcctacatgcagctcaacagcctgacatctgaggactctgcggtctattactgtgcaagggaggatggttacgacgcctggtttgcttactggggccaagggactctggtcactgtctccgcagccaaaacaacacccccatcagtctatccactggcccctgggtgtggagatacaactggttcctctgtgactctgggatgcctggtcaagggcta

SEQ ID NO: 192 - protein, 169 aa, synthetic construct
  REGION 1..169: note = Description of Artificial Sequence: Synthetic polypeptide
MGWSCIILILVAAATGVHSQVQLLQPGAELVKPGASVIMSCKASGYTFTTYWITWVKQRPGQGLEWIGDIYPGSSICNYNEKFKSKATLTVDTSSSTAYMQLNSLTSEDSAVYYCAREDGYDAWFAYWGQGTLVTVSAAKTTPPSVYPLAPGCGDTTGSSVTLGCLVKG

SEQ ID NO: 193 - protein, 150 aa, synthetic construct
  REGION 1..150: note = Description of Artificial Sequence: Synthetic polypeptide
QVQLLQPGAELVKPGASVIMSCKASGYTFTTYWITWVKQRPGQGLEWIGDIYPGSSICNYNEKFKSKATLTVDTSSSTAYMQLNSLTSEDSAVYYCAREDGYDAWFAYWGQGTLVTVSAAKTTPPSVYPLAPGCGDTTGSSVTLGCLVKG

SEQ ID NO: 194 - DNA, 57 bp, synthetic construct
  misc_feature 1..57: note = Description of Artificial Sequence: Synthetic oligonucleotide
  source 1..57: mol_type = other DNA
atgggatggagctgtatcatcctcattttggtagcagcagctacaggtgtccactcc

SEQ ID NO: 195 - DNA, 357 bp, synthetic construct
  misc_feature 1..357: note = Description of Artificial Sequence: Synthetic polynucleotide
  source 1..357: mol_type = other DNA
caggtccaactgctgcagcctggggctgagcttgtgaagcctggggcttcagtaataatgtcctgcaaggcttctggctacaccttcaccacctactggataacctgggtgaagcagaggcctggacaaggccttgagtggattggagatatttatcctggtagtagtatttgtaactacaatgagaagttcaagagcaaggccacactgactgtagacacatcctccagcacagcctacatgcagctcaacagcctgacatctgaggactctgcggtctattactgtgcaagggaggatggttacgacgcctggtttgcttactggggccaagggactctggtcactgtctccgca

SEQ ID NO: 196 - protein, 119 aa, synthetic construct
  REGION 1..119: note = Description of Artificial Sequence: Synthetic polypeptide
QVQLLQPGAELVKPGASVIMSCKASGYTFTTYWITWVKQRPGQGLEWIGDIYPGSSICNYNEKFKSKATLTVDTSSSTAYMQLNSLTSEDSAVYYCAREDGYDAWFAYWGQGTLVTVSA

SEQ ID NO: 197 - DNA, 95 bp, synthetic construct
  misc_feature 1..95: note = Description of Artificial Sequence: Synthetic oligonucleotide
  source 1..95: mol_type = other DNA
gccaaaacaacacccccatcagtctatccactggcccctgggtgtggagatacaactggttcctctgtgactctgggatgcctggtcaagggcta

SEQ ID NO: 198 - protein, 31 aa, synthetic construct
  REGION 1..31: note = Description of Artificial Sequence: Synthetic polypeptide
AKTTPPSVYPLAPGCGDTTGSSVTLGCLVKG

SEQ ID NO: 199 - DNA, 1407 bp, synthetic construct
  misc_feature 1..1407: note = Description of Artificial Sequence: Synthetic polynucleotide
  source 1..1407: mol_type = other DNA
atgggctggtcctgcatcatcctgtttctggtggccaccgccaccggcgtgcacagccaggtgcagctggtgcagtctggcgccgaagtgaagaaacctggcgcctccgtgaaggtgtcctgcaaggcttccggctacacctttaccacctactggatcacctgggtgcgacaggctcctggacagggcctggaatggatgggcgacatctaccccggctcctccatctgcaactacaacgagaagttcaagtcccgcgtgaccatgacccgggacacctccaccagcaccgtgtacatggaactgtcctccctgcggagcgaggacaccgccgtgtactactgcgctagagaggacggctacgacgcttggtttgcctactggggccagggcaccctcgtgaccgtgtcatctgcatccaccaagggcccatcggtcttccccctggcaccctcctccaagagcacctctgggggcacagcggccctgggctgcctggtcaaggactacttccccgaaccggtgacggtgtcgtggaactcaggcgccctgaccagcggcgtgcacaccttcccggctgtcctacagtcctcaggactctactccctcagcagcgtggtgaccgtgccctccagcagcttgggcacccagacctacatctgcaacgtgaatcacaagcccagcaacaccaaggtggacaagaaagttgagcccaaatcttgtgacaaaactcacacatgcccaccgtgcccagcacctgaactcctggggggaccgtcagtcttcctcttccccccaaaacccaaggacaccctcatgatctcccggacccctgaggtcacatgcgtggtggtggacgtgagccacgaagaccctgaggtcaagttcaactggtacgtggacggcgtggaggtgcataatgccaagacaaagccgcgggaggagcagtacaacagcacgtaccgtgtggtcagcgtcctcaccgtcctgcaccaggactggctgaatggcaaggagtacaagtgcaaggtctccaacaaagccctcccagcccccatcgagaaaaccatctccaaagccaaagggcagccccgagaaccacaggtgtacaccctgcccccatcccgggatgagctgaccaagaaccaggtcagcctgacctgcctggtcaaaggcttctatcccagcgacatcgccgtggagtgggagagcaatgggcagccggagaacaactacaagaccacgcctcccgtgctggactccgacggctccttcttcttatattcaaagctcaccgtggacaagagcaggtggcagcaggggaacgtcttctcatgctccgtgatgcatgaggctctgcacaaccactacacgcagaagagcctctccctgtctcccgggaaatga

SEQ ID NO: 200 - DNA, 1350 bp, synthetic construct
  misc_feature 1..1350: note = Description of Artificial Sequence: Synthetic polynucleotide
  source 1..1350: mol_type = other DNA
caggtgcagctggtgcagtctggcgccgaagtgaagaaacctggcgcctccgtgaaggtgtcctgcaaggcttccggctacacctttaccacctactggatcacctgggtgcgacaggctcctggacagggcctggaatggatgggcgacatctaccccggctcctccatctgcaactacaacgagaagttcaagtcccgcgtgaccatgacccgggacacctccaccagcaccgtgtacatggaactgtcctccctgcggagcgaggacaccgccgtgtactactgcgctagagaggacggctacgacgcttggtttgcctactggggccagggcaccctcgtgaccgtgtcatctgcatccaccaagggcccatcggtcttccccctggcaccctcctccaagagcacctctgggggcacagcggccctgggctgcctggtcaaggactacttccccgaaccggtgacggtgtcgtggaactcaggcgccctgaccagcggcgtgcacaccttcccggctgtcctacagtcctcaggactctactccctcagcagcgtggtgaccgtgccctccagcagcttgggcacccagacctacatctgcaacgtgaatcacaagcccagcaacaccaaggtggacaagaaagttgagcccaaatcttgtgacaaaactcacacatgcccaccgtgcccagcacctgaactcctggggggaccgtcagtcttcctcttccccccaaaacccaaggacaccctcatgatctcccggacccctgaggtcacatgcgtggtggtggacgtgagccacgaagaccctgaggtcaagttcaactggtacgtggacggcgtggaggtgcataatgccaagacaaagccgcgggaggagcagtacaacagcacgtaccgtgtggtcagcgtcctcaccgtcctgcaccaggactggctgaatggcaaggagtacaagtgcaaggtctccaacaaagccctcccagcccccatcgagaaaaccatctccaaagccaaagggcagccccgagaaccacaggtgtacaccctgcccccatcccgggatgagctgaccaagaaccaggtcagcctgacctgcctggtcaaaggcttctatcccagcgacatcgccgtggagtgggagagcaatgggcagccggagaacaactacaagaccacgcctcccgtgctggactccgacggctccttcttcttatattcaaagctcaccgtggacaagagcaggtggcagcaggggaacgtcttctcatgctccgtgatgcatgaggctctgcacaaccactacacgcagaagagcctctccctgtctcccgggaaatga

SEQ ID NO: 201 - protein, 468 aa, synthetic construct
  REGION 1..468: note = Description of Artificial Sequence: Synthetic polypeptide
MGWSCIILFLVATATGVHSQVQLVQSGAEVKKPGASVKVSCKASGYTFTTYWITWVRQAPGQGLEWMGDIYPGSSICNYNEKFKSRVTMTRDTSTSTVYMELSSLRSEDTAVYYCAREDGYDAWFAYWGQGTLVTVSSASTKGPSVFPLAPSSKSTSGGTAALGCLVKDYFPEPVTVSWNSGALTSGVHTFPAVLQSSGLYSLSSVVTVPSSSLGTQTYICNVNHKPSNTKVDKKVEPKSCDKTHTCPPCPAPELLGGPSVFLFPPKPKDTLMISRTPEVTCVVVDVSHEDPEVKFNWYVDGVEVHNAKTKPREEQYNSTYRVVSVLTVLHQDWLNGKEYKCKVSNKALPAPIEKTISKAKGQPREPQVYTLPPSRDELTKNQVSLTCLVKGFYPSDIAVEWESNGQPENNYKTTPPVLDSDGSFFLYSKLTVDKSRWQQGNVFSCSVMHEALHNHYTQKSLSLSPGK

SEQ ID NO: 202 - protein, 449 aa, synthetic construct
  REGION 1..449: note = Description of Artificial Sequence: Synthetic polypeptide
QVQLVQSGAEVKKPGASVKVSCKASGYTFTTYWITWVRQAPGQGLEWMGDIYPGSSICNYNEKFKSRVTMTRDTSTSTVYMELSSLRSEDTAVYYCAREDGYDAWFAYWGQGTLVTVSSASTKGPSVFPLAPSSKSTSGGTAALGCLVKDYFPEPVTVSWNSGALTSGVHTFPAVLQSSGLYSLSSVVTVPSSSLGTQTYICNVNHKPSNTKVDKKVEPKSCDKTHTCPPCPAPELLGGPSVFLFPPKPKDTLMISRTPEVTCVVVDVSHEDPEVKFNWYVDGVEVHNAKTKPREEQYNSTYRVVSVLTVLHQDWLNGKEYKCKVSNKALPAPIEKTISKAKGQPREPQVYTLPPSRDELTKNQVSLTCLVKGFYPSDIAVEWESNGQPENNYKTTPPVLDSDGSFFLYSKLTVDKSRWQQGNVFSCSVMHEALHNHYTQKSLSLSPGK

SEQ ID NO: 203 - DNA, 57 bp, synthetic construct
  misc_feature 1..57: note = Description of Artificial Sequence: Synthetic oligonucleotide
  source 1..57: mol_type = other DNA
atgggctggtcctgcatcatcctgtttctggtggccaccgccaccggcgtgcacagc

SEQ ID NO: 204 - DNA, 414 bp, synthetic construct
  misc_feature 1..414: note = Description of Artificial Sequence: Synthetic polynucleotide
  source 1..414: mol_type = other DNA
atgggctggtcctgcatcatcctgtttctggtggccaccgccaccggcgtgcacagccaggtgcagctggtgcagtctggcgccgaagtgaagaaacctggcgcctccgtgaaggtgtcctgcaaggcttccggctacacctttaccacctactggatcacctgggtgcgacaggctcctggacagggcctggaatggatgggcgacatctaccccggctcctccatctgcaactacaacgagaagttcaagtcccgcgtgaccatgacccgggacacctccaccagcaccgtgtacatggaactgtcctccctgcggagcgaggacaccgccgtgtactactgcgctagagaggacggctacgacgcttggtttgcctactggggccagggcaccctcgtgaccgtgtcatct

SEQ ID NO: 205 - protein, 119 aa, synthetic construct
  REGION 1..119: note = Description of Artificial Sequence: Synthetic polypeptide
QVQLVQSGAEVKKPGASVKVSCKASGYTFTTYWITWVRQAPGQGLEWMGDIYPGSSICNYNEKFKSRVTMTRDTSTSTVYMELSSLRSEDTAVYYCAREDGYDAWFAYWGQGTLVTVSS

SEQ ID NO: 206 - DNA, 987 bp, synthetic construct
  misc_feature 1..987: note = Description of Artificial Sequence: Synthetic polynucleotide
  source 1..987: mol_type = other DNA
gcatccaccaagggcccatcggtcttccccctggcaccctcctccaagagcacctctgggggcacagcggccctgggctgcctggtcaaggactacttccccgaaccggtgacggtgtcgtggaactcaggcgccctgaccagcggcgtgcacaccttcccggctgtcctacagtcctcaggactctactccctcagcagcgtggtgaccgtgccctccagcagcttgggcacccagacctacatctgcaacgtgaatcacaagcccagcaacaccaaggtggacaagaaagttgagcccaaatcttgtgacaaaactcacacatgcccaccgtgcccagcacctgaactcctggggggaccgtcagtcttcctcttccccccaaaacccaaggacaccctcatgatctcccggacccctgaggtcacatgcgtggtggtggacgtgagccacgaagaccctgaggtcaagttcaactggtacgtggacggcgtggaggtgcataatgccaagacaaagccgcgggaggagcagtacaacagcacgtaccgtgtggtcagcgtcctcaccgtcctgcaccaggactggctgaatggcaaggagtacaagtgcaaggtctccaacaaagccctcccagcccccatcgagaaaaccatctccaaagccaaagggcagccccgagaaccacaggtgtacaccctgcccccatcccgggatgagctgaccaagaaccaggtcagcctgacctgcctggtcaaaggcttctatcccagcgacatcgccgtggagtgggagagcaatgggcagccggagaacaactacaagaccacgcctcccgtgctggactccgacggctccttcttcttatattcaaagctcaccgtggacaagagcaggtggcagcaggggaacgtcttctcatgctccgtgatgcatgaggctctgcacaaccactacacgcagaagagcctctccctgtctcccggg

SEQ ID NO: 207 - protein, 309 aa, synthetic construct
  REGION 1..309: note = Description of Artificial Sequence: Synthetic polypeptide
ASTKGPSVFPLAPSSKSTSGGTAALGCLVKDYFPEPVTVSWNSGALTSGVHTFPAVLQSSGLYSLSSVVTVPSSSLGTQTYICNVNHKPSNTKVDKKVEPKSCDKTHTCPPCPAPELLGGPSVFLFPPKPKDTLMISRTPEVTCVVVDVSHEDPEVKFNWYVDGVEVHNAKTKPREEQYNSTYRVVSVLTVLHQDWLNGKEYKCKVSNKALPAPIEKTISKAKGQPREPQVYTLPPSRDELTKNQVSLTCLVKGFYPSDIAVEWESNGQPENNYKTTPPVLDSDGSFFLYSKLTVDKSRWQQGNVFSCS

SEQ ID NO: 208 - DNA, 1407 bp, synthetic construct
  misc_feature 1..1407: note = Description of Artificial Sequence: Synthetic polynucleotide
  source 1..1407: mol_type = other DNA
atgggctggtcctgcatcatcctgtttctggtggccaccgccaccggcgtgcacagccaggtgcagctggtgcagtctggcgccgaagtgaagaaacctggcgcctccgtgaaggtgtcctgcaaggcttccggctacacctttaccacctactggatcacctgggtgcgacaggctcctggacagggcctggaatggatgggcgacatctaccccggctcctccatctgcaactacaacgagaagttcaagtcccgcgtgaccatgaccgtggacacctccaccagcaccgtgtacatggaactgtcctccctgcggagcgaggacaccgccgtgtactactgcgctagagaggacggctacgacgcttggtttgcctactggggccagggcaccctcgtgaccgtgtcatctgcatccaccaagggcccatcggtcttccccctggcaccctcctccaagagcacctctgggggcacagcggccctgggctgcctggtcaaggactacttccccgaaccggtgacggtgtcgtggaactcaggcgccctgaccagcggcgtgcacaccttcccggctgtcctacagtcctcaggactctactccctcagcagcgtggtgaccgtgccctccagcagcttgggcacccagacctacatctgcaacgtgaatcacaagcccagcaacaccaaggtggacaagaaagttgagcccaaatcttgtgacaaaactcacacatgcccaccgtgcccagcacctgaactcctggggggaccgtcagtcttcctcttccccccaaaacccaaggacaccctcatgatctcccggacccctgaggtcacatgcgtggtggtggacgtgagccacgaagaccctgaggtcaagttcaactggtacgtggacggcgtggaggtgcataatgccaagacaaagccgcgggaggagcagtacaacagcacgtaccgtgtggtcagcgtcctcaccgtcctgcaccaggactggctgaatggcaaggagtacaagtgcaaggtctccaacaaagccctcccagcccccatcgagaaaaccatctccaaagccaaagggcagccccgagaaccacaggtgtacaccctgcccccatcccgggatgagctgaccaagaaccaggtcagcctgacctgcctggtcaaaggcttctatcccagcgacatcgccgtggagtgggagagcaatgggcagccggagaacaactacaagaccacgcctcccgtgctggactccgacggctccttcttcttatattcaaagctcaccgtggacaagagcaggtggcagcaggggaacgtcttctcatgctccgtgatgcatgaggctctgcacaaccactacacgcagaagagcctctccctgtctcccgggaaatga

SEQ ID NO: 209 - DNA, 1350 bp, synthetic construct
  misc_feature 1..1350: note = Description of Artificial Sequence: Synthetic polynucleotide
  source 1..1350: mol_type = other DNA
caggtgcagctggtgcagtctggcgccgaagtgaagaaacctggcgcctccgtgaaggtgtcctgcaaggcttccggctacacctttaccacctactggatcacctgggtgcgacaggctcctggacagggcctggaatggatgggcgacatctaccccggctcctccatctgcaactacaacgagaagttcaagtcccgcgtgaccatgaccgtggacacctccaccagcaccgtgtacatggaactgtcctccctgcggagcgaggacaccgccgtgtactactgcgctagagaggacggctacgacgcttggtttgcctactggggccagggcaccctcgtgaccgtgtcatctgcatccaccaagggcccatcggtcttccccctggcaccctcctccaagagcacctctgggggcacagcggccctgggctgcctggtcaaggactacttccccgaaccggtgacggtgtcgtggaactcaggcgccctgaccagcggcgtgcacaccttcccggctgtcctacagtcctcaggactctactccctcagcagcgtggtgaccgtgccctccagcagcttgggcacccagacctacatctgcaacgtgaatcacaagcccagcaacaccaaggtggacaagaaagttgagcccaaatcttgtgacaaaactcacacatgcccaccgtgcccagcacctgaactcctggggggaccgtcagtcttcctcttccccccaaaacccaaggacaccctcatgatctcccggacccctgaggtcacatgcgtggtggtggacgtgagccacgaagaccctgaggtcaagttcaactggtacgtggacggcgtggaggtgcataatgccaagacaaagccgcgggaggagcagtacaacagcacgtaccgtgtggtcagcgtcctcaccgtcctgcaccaggactggctgaatggcaaggagtacaagtgcaaggtctccaacaaagccctcccagcccccatcgagaaaaccatctccaaagccaaagggcagccccgagaaccacaggtgtacaccctgcccccatcccgggatgagctgaccaagaaccaggtcagcctgacctgcctggtcaaaggcttctatcccagcgacatcgccgtggagtgggagagcaatgggcagccggagaacaactacaagaccacgcctcccgtgctggactccgacggctccttcttcttatattcaaagctcaccgtggacaagagcaggtggcagcaggggaacgtcttctcatgctccgtgatgcatgaggctctgcacaaccactacacgcagaagagcctctccctgtctcccgggaaatga

SEQ ID NO: 210 - protein, 468 aa, synthetic construct
  REGION 1..468: note = Description of Artificial Sequence: Synthetic polypeptide
MGWSCIILFLVATATGVHSQVQLVQSGAEVKKPGASVKVSCKASGYTFTTYWITWVRQAPGQGLEWMGDIYPGSSICNYNEKFKSRVTMTVDTSTSTVYMELSSLRSEDTAVYYCAREDGYDAWFAYWGQGTLVTVSSASTKGPSVFPLAPSSKSTSGGTAALGCLVKDYFPEPVTVSWNSGALTSGVHTFPAVLQSSGLYSLSSVVTVPSSSLGTQTYICNVNHKPSNTKVDKKVEPKSCDKTHTCPPCPAPELLGGPSVFLFPPKPKDTLMISRTPEVTCVVVDVSHEDPEVKFNWYVDGVEVHNAKTKPREEQYNSTYRVVSVLTVLHQDWLNGKEYKCKVSNKALPAPIEKTISKAKGQPREPQVYTLPPSRDELTKNQVSLTCLVKGFYPSDIAVEWESNGQPENNYKTTPPVLDSDGSFFLYSKLTVDKSRWQQGNVFSCSVMHEALHNHYTQKSLSLSPGK

SEQ ID NO: 211 - protein, 449 aa, synthetic construct
  REGION 1..449: note = Description of Artificial Sequence: Synthetic polypeptide
QVQLVQSGAEVKKPGASVKVSCKASGYTFTTYWITWVRQAPGQGLEWMGDIYPGSSICNYNEKFKSRVTMTVDTSTSTVYMELSSLRSEDTAVYYCAREDGYDAWFAYWGQGTLVTVSSASTKGPSVFPLAPSSKSTSGGTAALGCLVKDYFPEPVTVSWNSGALTSGVHTFPAVLQSSGLYSLSSVVTVPSSSLGTQTYICNVNHKPSNTKVDKKVEPKSCDKTHTCPPCPAPELLGGPSVFLFPPKPKDTLMISRTPEVTCVVVDVSHEDPEVKFNWYVDGVEVHNAKTKPREEQYNSTYRVVSVLTVLHQDWLNGKEYKCKVSNKALPAPIEKTISKAKGQPREPQVYTLPPSRDELTKNQVSLTCLVKGFYPSDIAVEWESNGQPENNYKTTPPVLDSDGSFFLYSKLTVDKSRWQQGNVFSCSVMHEALHNHYTQKSLSLSPGK

SEQ ID NO: 212 - DNA, 57 bp, synthetic construct; identical to SEQ ID NO: 203
  misc_feature 1..57: note = Description of Artificial Sequence: Synthetic oligonucleotide
  source 1..57: mol_type = other DNA

SEQ ID NO: 213 - DNA, 357 bp, synthetic construct
  misc_feature 1..357: note = Description of Artificial Sequence: Synthetic polynucleotide
  source 1..357: mol_type = other DNA
caggtgcagctggtgcagtctggcgccgaagtgaagaaacctggcgcctccgtgaaggtgtcctgcaaggcttccggctacacctttaccacctactggatcacctgggtgcgacaggctcctggacagggcctggaatggatgggcgacatctaccccggctcctccatctgcaactacaacgagaagttcaagtcccgcgtgaccatgaccgtggacacctccaccagcaccgtgtacatggaactgtcctccctgcggagcgaggacaccgccgtgtactactgcgctagagaggacggctacgacgcttggtttgcctactggggccagggcaccctcgtgaccgtgtcatct

SEQ ID NO: 214 - protein, 119 aa, synthetic construct
  REGION 1..119: note = Description of Artificial Sequence: Synthetic polypeptide
QVQLVQSGAEVKKPGASVKVSCKASGYTFTTYWITWVRQAPGQGLEWMGDIYPGSSICNYNEKFKSRVTMTVDTSTSTVYMELSSLRSEDTAVYYCAREDGYDAWFAYWGQGTLVTVSS

SEQ ID NO: 215 - DNA, 987 bp, synthetic construct; identical to SEQ ID NO: 206
  misc_feature 1..987: note = Description of Artificial Sequence: Synthetic polynucleotide
  source 1..987: mol_type = other DNA

SEQ ID NO: 216 - protein, 330 aa, synthetic construct [sequence omitted]

SEQ ID NO: 217 - DNA, 1407 bp, synthetic construct
  misc_feature 1..1407: note = Description of Artificial Sequence: Synthetic polynucleotide
  source 1..1407: mol_type = other DNA
atgggctggtcctgcatcatcctgtttctggtggccaccgccaccggcgtgcacagccaggtgcagctggtgcagtctggcgccgaagtgaagaaacctggcgcctccgtgaaggtgtcctgcaaggcttccggctacacctttaccacctactggatcacctgggtgcgacaggctcctggacagggcctggaatggatgggcgacatctaccccggctcctccatctgcaactacaacgagaagttcaagtcccgcgtgaccatgaccgtggacacctccaccagcaccgcctacatggaactgtcctccctgcggagcgaggacaccgccgtgtactactgcgctagagaggacggctacgacgcttggtttgcctactggggccagggcaccctcgtgaccgtgtcatctgcatccaccaagggcccatcggtcttccccctggcaccctcctccaagagcacctctgggggcacagcggccctgggctgcctggtcaaggactacttccccgaaccggtgacggtgtcgtggaactcaggcgccctgaccagcggcgtgcacaccttcccggctgtcctacagtcctcaggactctactccctcagcagcgtggtgaccgtgccctccagcagcttgggcacccagacctacatctgcaacgtgaatcacaagcccagcaacaccaaggtggacaagaaagttgagcccaaatcttgtgacaaaactcacacatgcccaccgtgcccagcacctgaactcctggggggaccgtcagtcttcctcttccccccaaaacccaaggacaccctcatgatctcccggacccctgaggtcacatgcgtggtggtggacgtgagccacgaagaccctgaggtcaagttcaactggtacgtggacggcgtggaggtgcataatgccaagacaaagccgcgggaggagcagtacaacagcacgtaccgtgtggtcagcgtcctcaccgtcctgcaccaggactggctgaatggcaaggagtacaagtgcaaggtctccaacaaagccctcccagcccccatcgagaaaaccatctccaaagccaaagggcagccccgagaaccacaggtgtacaccctgcccccatcccgggatgagctgaccaagaaccaggtcagcctgacctgcctggtcaaaggcttctatcccagcgacatcgccgtggagtgggagagcaatgggcagccggagaacaactacaagaccacgcctcccgtgctggactccgacggctccttcttcttatattcaaagctcaccgtggacaagagcaggtggcagcaggggaacgtcttctcatgctccgtgatgcatgaggctctgcacaaccactacacgcagaagagcctctccctgtctcccgggaaatga

SEQ ID NO: 218 - DNA, 1350 bp, synthetic construct
  misc_feature 1..1350: note = Description of Artificial Sequence: Synthetic polynucleotide
  source 1..1350: mol_type = other DNA
caggtgcagctggtgcagtctggcgccgaagtgaagaaacctggcgcctccgtgaaggtgtcctgcaaggcttccggctacacctttaccacctactggatcacctgggtgcgacaggctcctggacagggcctggaatggatgggcgacatctaccccggctcctccatctgcaactacaacgagaagttcaagtcccgcgtgaccatgaccgtggacacctccaccagcaccgcctacatggaactgtcctccctgcggagcgaggacaccgccgtgtactactgcgctagagaggacggctacgacgcttggtttgcctactggggccagggcaccctcgtgaccgtgtcatctgcatccaccaagggcccatcggtcttccccctggcaccctcctccaagagcacctctgggggcacagcggccctgggctgcctggtcaaggactacttccccgaaccggtgacggtgtcgtggaactcaggcgccctgaccagcggcgtgcacaccttcccggctgtcctacagtcctcaggactctactccctcagcagcgtggtgaccgtgccctccagcagcttgggcacccagacctacatctgcaacgtgaatcacaagcccagcaacaccaaggtggacaagaaagttgagcccaaatcttgtgacaaaactcacacatgcccaccgtgcccagcacctgaactcctggggggaccgtcagtcttcctcttccccccaaaacccaaggacaccctcatgatctcccggacccctgaggtcacatgcgtggtggtggacgtgagccacgaagaccctgaggtcaagttcaactggtacgtggacggcgtggaggtgcataatgccaagacaaagccgcgggaggagcagtacaacagcacgtaccgtgtggtcagcgtcctcaccgtcctgcaccaggactggctgaatggcaaggagtacaagtgcaaggtctccaacaaagccctcccagcccccatcgagaaaaccatctccaaagccaaagggcagccccgagaaccacaggtgtacaccctgcccccatcccgggatgagctgaccaagaaccaggtcagcctgacctgcctggtcaaaggcttctatcccagcgacatcgccgtggagtgggagagcaatgggcagccggagaacaactacaagaccacgcctcccgtgctggactccgacggctccttcttcttatattcaaagctcaccgtggacaagagcaggtggcagcaggggaacgtcttctcatgctccgtgatgcatgaggctctgcacaaccactacacgcagaagagcctctccctgtctcccgggaaatga

SEQ ID NO: 219 - protein, 468 aa, synthetic construct
  REGION 1..468: note = Description of Artificial Sequence: Synthetic polypeptide
MGWSCIILFLVATATGVHSQVQLVQSGAEVKKPGASVKVSCKASGYTFTTYWITWVRQAPGQGLEWMGDIYPGSSICNYNEKFKSRVTMTVDTSTSTAYMELSSLRSEDTAVYYCAREDGYDAWFAYWGQGTLVTVSSASTKGPSVFPLAPSSKSTSGGTAALGCLVKDYFPEPVTVSWNSGALTSGVHTFPAVLQSSGLYSLSSVVTVPSSSLGTQTYICNVNHKPSNTKVDKKVEPKSCDKTHTCPPCPAPELLGGPSVFLFPPKPKDTLMISRTPEVTCVVVDVSHEDPEVKFNWYVDGVEVHNAKTKPREEQYNSTYRVVSVLTVLHQDWLNGKEYKCKVSNKALPAPIEKTISKAKGQPREPQVYTLPPSRDELTKNQVSLTCLVKGFYPSDIAVEWESNGQPENNYKTTPPVLDSDGSFFLYSKLTVDKSRWQQGNVFSCSVMHEALHNHYTQKSLSLSPGK

SEQ ID NO: 220 - protein, 449 aa, synthetic construct
  REGION 1..449: note = Description of Artificial Sequence: Synthetic polypeptide
QVQLVQSGAEVKKPGASVKVSCKASGYTFTTYWITWVRQAPGQGLEWMGDIYPGSSICNYNEKFKSRVTMTVDTSTSTAYMELSSLRSEDTAVYYCAREDGYDAWFAYWGQGTLVTVSSASTKGPSVFPLAPSSKSTSGGTAALGCLVKDYFPEPVTVSWNSGALTSGVHTFPAVLQSSGLYSLSSVVTVPSSSLGTQTYICNVNHKPSNTKVDKKVEPKSCDKTHTCPPCPAPELLGGPSVFLFPPKPKDTLMISRTPEVTCVVVDVSHEDPEVKFNWYVDGVEVHNAKTKPREEQYNSTYRVVSVLTVLHQDWLNGKEYKCKVSNKALPAPIEKTISKAKGQPREPQVYTLPPSRDELTKNQVSLTCLVKGFYPSDIAVEWESNGQPENNYKTTPPVLDSDGSFFLYSKLTVDKSRWQQGNVFSCSVMHEALHNHYTQKSLSLSPGK

SEQ ID NO: 221 - DNA, 57 bp, synthetic construct; identical to SEQ ID NO: 203
  misc_feature 1..57: note = Description of Artificial Sequence: Synthetic oligonucleotide
  source 1..57: mol_type = other DNA

SEQ ID NO: 222 - DNA, 357 bp, synthetic construct
  misc_feature 1..357: note = Description of Artificial Sequence: Synthetic polynucleotide
  source 1..357: mol_type = other DNA
caggtgcagctggtgcagtctggcgccgaagtgaagaaacctggcgcctccgtgaaggtgtcctgcaaggcttccggctacacctttaccacctactggatcacctgggtgcgacaggctcctggacagggcctggaatggatgggcgacatctaccccggctcctccatctgcaactacaacgagaagttcaagtcccgcgtgaccatgaccgtggacacctccaccagcaccgcctacatggaactgtcctccctgcggagcgaggacaccgccgtgtactactgcgctagagaggacggctacgacgcttggtttgcctactggggccagggcaccctcgtgaccgtgtcatct

SEQ ID NO: 223 - protein, 119 aa, synthetic construct
  REGION 1..119: note = Description of Artificial Sequence: Synthetic polypeptide
QVQLVQSGAEVKKPGASVKVSCKASGYTFTTYWITWVRQAPGQGLEWMGDIYPGSSICNYNEKFKSRVTMTVDTSTSTAYMELSSLRSEDTAVYYCAREDGYDAWFAYWGQGTLVTVSS

SEQ ID NO: 224 - DNA, 987 bp, synthetic construct; identical to SEQ ID NO: 206
  misc_feature 1..987: note = Description of Artificial Sequence: Synthetic polynucleotide
  source 1..987: mol_type = other DNA

SEQ ID NO: 225 - protein, 330 aa, synthetic construct [sequence omitted]

SEQ ID NO: 226 - DNA, 1407 bp, synthetic construct
  misc_feature 1..1407: note = Description of Artificial Sequence: Synthetic polynucleotide
  source 1..1407: mol_type = other DNA
atgggctggtcctgcatcatcctgtttctggtggccaccgccaccggcgtgcacagccaggtgcagctggtgcagtctggcgccgaagtgaagaaacctggcgcctccgtgaaggtgtcctgcaaggcttccggctacacctttaccacctactggatcacctgggtgcgacaggctcctggacagggcctggaatggatgggcgacatctaccccggctcctccatctgcaactacgcccagaaattccagggcagagtgaccatgaccgtggacacctccaccagcaccgcctacatggaactgtcctccctgcggagcgaggacaccgccgtgtactactgcgctagagaggacggctacgacgcttggtttgcctactggggccagggcaccctcgtgaccgtgtcatctgcatccaccaagggcccatcggtcttccccctggcaccctcctccaagagcacctctgggggcacagcggccctgggctgcctggtcaaggactacttccccgaaccggtgacggtgtcgtggaactcaggcgccctgaccagcggcgtgcacaccttcccggctgtcctacagtcctcaggactctactccctcagcagcgtggtgaccgtgccctccagcagcttgggcacccagacctacatctgcaacgtgaatcacaagcccagcaacaccaaggtggacaagaaagttgagcccaaatcttgtgacaaaactcacacatgcccaccgtgcccagcacctgaactcctggggggaccgtcagtcttcctcttccccccaaaacccaaggacaccctcatgatctcccggacccctgaggtcacatgcgtggtggtggacgtgagccacgaagaccctgaggtcaagttcaactggtacgtggacggcgtggaggtgcataatgccaagacaaagccgcgggaggagcagtacaacagcacgtaccgtgtggtcagcgtcctcaccgtcctgcaccaggactggctgaatggcaaggagtacaagtgcaaggtctccaacaaagccctcccagcccccatcgagaaaaccatctccaaagccaaagggcagccccgagaaccacaggtgtacaccctgcccccatcccgggatgagctgaccaagaaccaggtcagcctgacctgcctggtcaaaggcttctatcccagcgacatcgccgtggagtgggagagcaatgggcagccggagaacaactacaagaccacgcctcccgtgctggactccgacggctccttcttcttatattcaaagctcaccgtggacaagagcaggtggcagcaggggaacgtcttctcatgctccgtgatgcatgaggctctgcacaaccactacacgcagaagagcctctccctgtctcccgggaaatga

SEQ ID NO: 227 - DNA, 1350 bp, synthetic construct
  misc_feature 1..1350: note = Description of Artificial Sequence: Synthetic polynucleotide
  source 1..1350: mol_type = other DNA
caggtgcagctggtgcagtctggcgccgaagtgaagaaacctggcgcctccgtgaaggtgtcctgcaaggcttccggctacacctttaccacctactggatcacctgggtgcgacaggctcctggacagggcctggaatggatgggcgacatctaccccggctcctccatctgcaactacgcccagaaattccagggcagagtgaccatgaccgtggacacctccaccagcaccgcctacatggaactgtcctccctgcggagcgaggacaccgccgtgtactactgcgctagagaggacggctacgacgcttggtttgcctactggggccagggcaccctcgtgaccgtgtcatctgcatccaccaagggcccatcggtcttccccctggcaccctcctccaagagcacctctgggggcacagcggccctgggctgcctggtcaaggactacttccccgaaccggtgacggtgtcgtggaactcaggcgccctgaccagcggcgtgcacaccttcccggctgtcctacagtcctcaggactctactccctcagcagcgtggtgaccgtgccctccagcagcttgggcacccagacctacatctgcaacgtgaatcacaagcccagcaacaccaaggtggacaagaaagttgagcccaaatcttgtgacaaaactcacacatgcccaccgtgcccagcacctgaactcctggggggaccgtcagtcttcctcttccccccaaaacccaaggacaccctcatgatctcccggacccctgaggtcacatgcgtggtggtggacgtgagccacgaagaccctgaggtcaagttcaactggtacgtggacggcgtggaggtgcataatgccaagacaaagccgcgggaggagcagtacaacagcacgtaccgtgtggtcagcgtcctcaccgtcctgcaccaggactggctgaatggcaaggagtacaagtgcaaggtctccaacaaagccctcccagcccccatcgagaaaaccatctccaaagccaaagggcagccccgagaaccacaggtgtacaccctgcccccatcccgggatgagctgaccaagaaccaggtcagcctgacctgcctggtcaaaggcttctatcccagcgacatcgccgtggagtgggagagcaatgggcagccggagaacaactacaagaccacgcctcccgtgctggactccgacggctccttcttcttatattcaaagctcaccgtggacaagagcaggtggcagcaggggaacgtcttctcatgctccgtgatgcatgaggctctgcacaaccactacacgcagaagagcctctccctgtctcccgggaaatga

SEQ ID NO: 228 - protein, 468 aa, synthetic construct
  REGION 1..468: note = Description of Artificial Sequence: Synthetic polypeptide
MGWSCIILFLVATATGVHSQVQLVQSGAEVKKPGASVKVSCKASGYTFTTYWITWVRQAPGQGLEWMGDIYPGSSICNYAQKFQGRVTMTVDTSTSTAYMELSSLRSEDTAVYYCAREDGYDAWFAYWGQGTLVTVSSASTKGPSVFPLAPSSKSTSGGTAALGCLVKDYFPEPVTVSWNSGALTSGVHTFPAVLQSSGLYSLSSVVTVPSSSLGTQTYICNVNHKPSNTKVDKKVEPKSCDKTHTCPPCPAPELLGGPSVFLFPPKPKDTLMISRTPEVTCVVVDVSHEDPEVKFNWYVDGVEVHNAKTKPREEQYNSTYRVVSVLTVLHQDWLNGKEYKCKVSNKALPAPIEKTISKAKGQPREPQVYTLPPSRDELTKNQVSLTCLVKGFYPSDIAVEWESNGQPENNYKTTPPVLDSDGSFFLYSKLTVDKSRWQQGNVFSCSVMHEALHNHYTQKSLSLSPGK

SEQ ID NO: 229 - protein, 449 aa, synthetic construct
  REGION 1..449: note = Description of Artificial Sequence: Synthetic polypeptide
QVQLVQSGAEVKKPGASVKVSCKASGYTFTTYWITWVRQAPGQGLEWMGDIYPGSSICNYAQKFQGRVTMTVDTSTSTAYMELSSLRSEDTAVYYCAREDGYDAWFAYWGQGTLVTVSSASTKGPSVFPLAPSSKSTSGGTAALGCLVKDYFPEPVTVSWNSGALTSGVHTFPAVLQSSGLYSLSSVVTVPSSSLGTQTYICNVNHKPSNTKVDKKVEPKSCDKTHTCPPCPAPELLGGPSVFLFPPKPKDTLMISRTPEVTCVVVDVSHEDPEVKFNWYVDGVEVHNAKTKPREEQYNSTYRVVSVLTVLHQDWLNGKEYKCKVSNKALPAPIEKTISKAKGQPREPQVYTLPPSRDELTKNQVSLTCLVKGFYPSDIAVEWESNGQPENNYKTTPPVLDSDGSFFLYSKLTVDKSRWQQGNVFSCSVMHEALHNHYTQKSLSLSPGK

SEQ ID NO: 230 - DNA, 57 bp, synthetic construct; identical to SEQ ID NO: 203
  misc_feature 1..57: note = Description of Artificial Sequence: Synthetic oligonucleotide
  source 1..57: mol_type = other DNA

SEQ ID NO: 231 - DNA, 357 bp, synthetic construct
  misc_feature 1..357: note = Description of Artificial Sequence: Synthetic polynucleotide
  source 1..357: mol_type = other DNA
caggtgcagctggtgcagtctggcgccgaagtgaagaaacctggcgcctccgtgaaggtgtcctgcaaggcttccggctacacctttaccacctactggatcacctgggtgcgacaggctcctggacagggcctggaatggatgggcgacatctaccccggctcctccatctgcaactacgcccagaaattccagggcagagtgaccatgaccgtggacacctccaccagcaccgcctacatggaactgtcctccctgcggagcgaggacaccgccgtgtactactgcgctagagaggacggctacgacgcttggtttgcctactggggccagggcaccctcgtgaccgtgtcatct

SEQ ID NO: 232 - protein, 119 aa, synthetic construct
  REGION 1..119: note = Description of Artificial Sequence: Synthetic polypeptide
QVQLVQSGAEVKKPGASVKVSCKASGYTFTTYWITWVRQAPGQGLEWMGDIYPGSSICNYAQKFQGRVTMTVDTSTSTAYMELSSLRSEDTAVYYCAREDGYDAWFAYWGQGTLVTVSS

SEQ ID NO: 233 - DNA, 987 bp, synthetic construct; identical to SEQ ID NO: 206
  misc_feature 1..987: note = Description of Artificial Sequence: Synthetic polynucleotide
  source 1..987: mol_type = other DNA

SEQ ID NO: 234 - protein, 330 aa, synthetic construct [sequence omitted]

SEQ ID NO: 235 - DNA, 1407 bp, synthetic construct
  misc_feature 1..1407: note = Description of Artificial Sequence: Synthetic polynucleotide
  source 1..1407: mol_type = other DNA
atgggctggtcctgcatcatcctgtttctggtggccaccgccaccggcgtgcacagccaggtgcagctggtgcagtctggcgccgaagtgaagaaacctggcgcctccgtgaaggtgtcctgcaaggcttccggctacacctttaccacctactggatcacctgggtgcgacaggctcctggacagggcctggaatggatgggcgacatctaccccggctcctccatctccaactacaacgagaagttcaagtcccgcgtgaccatgaccgtggacacctccaccagcaccgcctacatggaactgtcctccctgcggagcgaggacaccgccgtgtactactgcgctagagaggacggctacgacgcttggtttgcctactggggccagggcaccctcgtgaccgtgtcatctgcatccaccaagggcccatcggtcttccccctggcaccctcctccaagagcacctctgggggcacagcggccctgggctgcctggtcaaggactacttccccgaaccggtgacggtgtcgtggaactcaggcgccctgaccagcggcgtgcacaccttcccggctgtcctacagtcctcaggactctactccctcagcagcgtggtgaccgtgccctccagcagcttgggcacccagacctacatctgcaacgtgaatcacaagcccagcaacaccaaggtggacaagaaagttgagcccaaatcttgtgacaaaactcacacatgcccaccgtgcccagcacctgaactcctggggggaccgtcagtcttcctcttccccccaaaacccaaggacaccctcatgatctcccggacccctgaggtcacatgcgtggtggtggacgtgagccacgaagaccctgaggtcaagttcaactggtacgtggacggcgtggaggtgcataatgccaagacaaagccgcgggaggagcagtacaacagcacgtaccgtgtggtcagcgtcctcaccgtcctgcaccaggactggctgaatggcaaggagtacaagtgcaaggtctccaacaaagccctcccagcccccatcgagaaaaccatctccaaagccaaagggcagccccgagaaccacaggtgtacaccctgcccccatcccgggatgagctgaccaagaaccaggtcagcctgacctgcctggtcaaaggcttctatcccagcgacatcgccgtggagtgggagagcaatgggcagccggagaacaactacaagaccacgcctcccgtgctggactccgacggctccttcttcttatattcaaagctcaccgtggacaagagcaggtggcagcaggggaacgtcttctcatgctccgtgatgcatgaggctctgcacaaccactacacgcagaagagcctctccctgtctcccgggaaatga

SEQ ID NO: 236 - DNA, 1350 bp, synthetic construct
  misc_feature 1..1350: note = Description of Artificial Sequence: Synthetic polynucleotide
  source 1..1350: mol_type = other DNA
caggtgcagctggtgcagtctggcgccgaagtgaagaaacctggcgcctccgtgaaggtgtcctgcaaggcttccggctacacctttaccacctactggatcacctgggtgcgacaggctcctggacagggcctggaatggatgggcgacatctaccccggctcctccatctccaactacaacgagaagttcaagtcccgcgtgaccatgaccgtggacacctccaccagcaccgcctacatggaactgtcctccctgcggagcgaggacaccgccgtgtactactgcgctagagaggacggctacgacgcttggtttgcctactggggccagggcaccctcgtgaccgtgtcatctgcatccaccaagggcccatcggtcttccccctggcaccctcctccaagagcacctctgggggcacagcggccctgggctgcctggtcaaggactacttccccgaaccggtgacggtgtcgtggaactcaggcgccctgaccagcggcgtgcacaccttcccggctgtcctacagtcctcaggactctactccctcagcagcgtggtgaccgtgccctccagcagcttgggcacccagacctacatctgcaacgtgaatcacaagcccagcaacaccaaggtggacaagaaagttgagcccaaatcttgtgacaaaactcacacatgcccaccgtgcccagcacctgaactcctggggggaccgtcagtcttcctcttccccccaaaacccaaggacaccctcatgatctcccggacccctgaggtcacatgcgtggtggtggacgtgagccacgaagaccctgaggtcaagttcaactggtacgtggacggcgtggaggtgcataatgccaagacaaagccgcgggaggagcagtacaacagcacgtaccgtgtggtcagcgtcctcaccgtcctgcaccaggactggctgaatggcaaggagtacaagtgcaaggtctccaacaaagccctcccagcccccatcgagaaaaccatctccaaagccaaagggcagccccgagaaccacaggtgtacaccctgcccccatcccgggatgagctgaccaagaaccaggtcagcctgacctgcctggtcaaaggcttctatcccagcgacatcgccgtggagtgggagagcaatgggcagccggagaacaactacaagaccacgcctcccgtgctggactccgacggctccttcttcttatattcaaagctcaccgtggacaagagcaggtggcagcaggggaacgtcttctcatgctccgtgatgcatgaggctctgcacaaccactacacgcagaagagcctctccctgtctcccgggaaatga

SEQ ID NO: 237 - protein, 468 aa, synthetic construct
  REGION 1..468: note = Description of Artificial Sequence: Synthetic polypeptide
MGWSCIILFLVATATGVHSQVQLVQSGAEVKKPGASVKVSCKASGYTFTTYWITWVRQAPGQGLEWMGDIYPGSSISNYNEKFKSRVTMTVDTSTSTAYMELSSLRSEDTAVYYCAREDGYDAWFAYWGQGTLVTVSSASTKGPSVFPLAPSSKSTSGGTAALGCLVKDYFPEPVTVSWNSGALTSGVHTFPAVLQSSGLYSLSSVVTVPSSSLGTQTYICNVNHKPSNTKVDKKVEPKSCDKTHTCPPCPAPELLGGPSVFLFPPKPKDTLMISRTPEVTCVVVDVSHEDPEVKFNWYVDGVEVHNAKTKPREEQYNSTYRVVSVLTVLHQDWLNGKEYKCKVSNKALPAPIEKTISKAKGQPREPQVYTLPPSRDELTKNQVSLTCLVKGFYPSDIAVEWESNGQPENNYKTTPPVLDSDGSFFLYSKLTVDKSRWQQGNVFSCSVMHEALHNHYTQKSLSLSPGK

SEQ ID NO: 238 - protein, 449 aa, synthetic construct
  REGION 1..449: note = Description of Artificial Sequence: Synthetic polypeptide
QVQLVQSGAEVKKPGASVKVSCKASGYTFTTYWITWVRQAPGQGLEWMGDIYPGSSISNYNEKFKSRVTMTVDTSTSTAYMELSSLRSEDTAVYYCAREDGYDAWFAYWGQGTLVTVSSASTKGPSVFPLAPSSKSTSGGTAALGCLVKDYFPEPVTVSWNSGALTSGVHTFPAVLQSSGLYSLSSVVTVPSSSLGTQTYICNVNHKPSNTKVDKKVEPKSCDKTHTCPPCPAPELLGGPSVFLFPPKPKDTLMISRTPEVTCVVVDVSHEDPEVKFNWYVDGVEVHNAKTKPREEQYNSTYRVVSVLTVLHQDWLNGKEYKCKVSNKALPAPIEKTISKAKGQPREPQVYTLPPSRDELTKNQVSLTCLVKGFYPSDIAVEWESNGQPENNYKTTPPVLDSDGSFFLYSKLTVDKSRWQQGNVFSCSVMHEALHNHYTQKSLSLSPGK

SEQ ID NO: 239 - DNA, 57 bp, synthetic construct; identical to SEQ ID NO: 203
  misc_feature 1..57: note = Description of Artificial Sequence: Synthetic oligonucleotide
  source 1..57: mol_type = other DNA

SEQ ID NO: 240 - DNA, 357 bp, synthetic construct
  misc_feature 1..357: note = Description of Artificial Sequence: Synthetic polynucleotide
  source 1..357: mol_type = other DNA
caggtgcagctggtgcagtctggcgccgaagtgaagaaacctggcgcctccgtgaaggtgtcctgcaaggcttccggctacacctttaccacctactggatcacctgggtgcgacaggctcctggacagggcctggaatggatgggcgacatctaccccggctcctccatctccaactacaacgagaagttcaagtcccgcgtgaccatgaccgtggacacctccaccagcaccgcctacatggaactgtcctccctgcggagcgaggacaccgccgtgtactactgcgctagagaggacggctacgacgcttggtttgcctactggggccagggcaccctcgtgaccgtgtcatct

SEQ ID NO: 241 - protein, 119 aa, synthetic construct
  REGION 1..119: note = Description of Artificial Sequence: Synthetic polypeptide
QVQLVQSGAEVKKPGASVKVSCKASGYTFTTYWITWVRQAPGQGLEWMGDIYPGSSISNYNEKFKSRVTMTVDTSTSTAYMELSSLRSEDTAVYYCAREDGYDAWFAYWGQGTLVTVSS

SEQ ID NO: 242 - DNA, 987 bp, synthetic construct; identical to SEQ ID NO: 206
  misc_feature 1..987: note = Description of Artificial Sequence: Synthetic polynucleotide
  source 1..987: mol_type = other DNA

SEQ ID NO: 243 - protein, 330 aa, synthetic construct [sequence omitted]

SEQ ID NO: 244 - DNA, 1407 bp, synthetic construct
  misc_feature 1..1407: note = Description of Artificial Sequence: Synthetic polynucleotide
  source 1..1407: mol_type = other DNA
atgggctggtcctgcatcatcctgtttctggtggccaccgccaccggcgtgcacagccaggtgcagctggtgcagtctggcgccgaagtgaagaaacctggcgcctccgtgaaggtgtcctgcaaggcttccggctacacctttaccacctactggatcacctgggtgcgacaggctcctggacagggcctggaatggatgggcgacatctaccccggctcctccatctccaactacaacgagaagttcaagtcccgcgtgaccatgaccgtggacacctccaccagcaccgtgtacatggaactgtcctccctgcggagcgaggacaccgccgtgtactactgcgctagagaggacggctacgacgcttggtttgcctactggggccagggcaccctcgtgaccgtgtcatctgcatccaccaagggcccatcggtcttccccctggcaccctcctccaagagcacctctgggggcacagcggccctgggctgcctggtcaaggactacttccccgaaccggtgacggtgtcgtggaactcaggcgccctgaccagcggcgtgcacaccttcccggctgtcctacagtcctcaggactctactccctcagcagcgtggtgaccgtgccctccagcagcttgggcacccagacctacatctgcaacgtgaatcacaagcccagcaacaccaaggtggacaagaaagttgagcccaaatcttgtgacaaaactcacacatgcccaccgtgcccagcacctgaactcctggggggaccgtcagtcttcctcttccccccaaaacccaaggacaccctcatgatctcccggacccctgaggtcacatgcgtggtggtggacgtgagccacgaagaccctgaggtcaagttcaactggtacgtggacggcgtggaggtgcataatgccaagacaaagccgcgggaggagcagtacaacagcacgtaccgtgtggtcagcgtcctcaccgtcctgcaccaggactggctgaatggcaaggagtacaagtgcaaggtctccaacaaagccctcccagcccccatcgagaaaaccatctccaaagccaaagggcagccccgagaaccacaggtgtacaccctgcccccatcccgggatgagctgaccaagaaccaggtcagcctgacctgcctggtcaaaggcttctatcccagcgacatcgccgtggagtgggagagcaatgggcagccggagaacaactacaagaccacgcctcccgtgctggactccgacggctccttcttcttatattcaaagctcaccgtggacaagagcaggtggcagcaggggaacgtcttctcatgctccgtgatgcatgaggctctgcacaaccactacacgcagaagagcctctccctgtctcccgggaaatga

SEQ ID NO: 245 - DNA, 1350 bp, synthetic construct
  misc_feature 1..1350: note = Description of Artificial Sequence: Synthetic polynucleotide
  source 1..1350: mol_type = other DNA
caggtgcagctggtgcagtctggcgccgaagtgaagaaacctggcgcctccgtgaaggtgtcctgcaaggcttccggctacacctttaccacctactggatcacctgggtgcgacaggctcctggacagggcctggaatggatgggcgacatctaccccggctcctccatctccaactacaacgagaagttcaagtcccgcgtgaccatgaccgtggacacctccaccagcaccgtgtacatggaactgtcctccctgcggagcgaggacaccgccgtgtactactgcgctagagaggacggctacgacgcttggtttgcctactggggccagggcaccctcgtgaccgtgtcatctgcatccaccaagggcccatcggtcttccccctggcaccctcctccaagagcacctctgggggcacagcggccctgggctgcctggtcaaggactacttccccgaaccggtgacggtgtcgtggaactcaggcgccctgaccagcggcgtgcacaccttcccggctgtcctacagtcctcaggactctactccctcagcagcgtggtgaccgtgccctccagcagcttgggcacccagacctacatctgcaacgtgaatcacaagcccagcaacaccaaggtggacaagaaagttgagcccaaatcttgtgacaaaactcacacatgcccaccgtgcccagcacctgaactcctggggggaccgtcagtcttcctcttccccccaaaacccaaggacaccctcatgatctcccggacccctgaggtcacatgcgtggtggtggacgtgagccacgaagaccctgaggtcaagttcaactggtacgtggacggcgtggaggtgcataatgccaagacaaagccgcgggaggagcagtacaacagcacgtaccgtgtggtcagcgtcctcaccgtcctgcaccaggactggctgaatggcaaggagtacaagtgcaaggtctccaacaaagccctcccagcccccatcgagaaaaccatctccaaagccaaagggcagccccgagaaccacaggtgtacaccctgcccccatcccgggatgagctgaccaagaaccaggtcagcctgacctgcctggtcaaaggcttctatcccagcgacatcgccgtggagtgggagagcaatgggcagccggagaacaactacaagaccacgcctcccgtgctggactccgacggctccttcttcttatattcaaagctcaccgtggacaagagcaggtggcagcaggggaacgtcttctcatgctccgtgatgcatgaggctctgcacaaccactacacgcagaagagcctctccctgtctcccgggaaatga

SEQ ID NO: 246 - protein, 468 aa, synthetic construct
  REGION 1..468: note = Description of Artificial Sequence: Synthetic polypeptide
MGWSCIILFLVATATGVHSQVQLVQSGAEVKKPGASVKVSCKASGYTFTTYWITWVRQAPGQGLEWMGDIYPGSSISNYNEKFKSRVTMTVDTSTSTVYMELSSLRSEDTAVYYCAREDGYDAWFAYWGQGTLVTVSSASTKGPSVFPLAPSSKSTSGGTAALGCLVKDYFPEPVTVSWNSGALTSGVHTFPAVLQSSGLYSLSSVVTVPSSSLGTQTYICNVNHKPSNTKVDKKVEPKSCDKTHTCPPCPAPELLGGPSVFLFPPKPKDTLMISRTPEVTCVVVDVSHEDPEVKFNWYVDGVEVHNAKTKPREEQYNSTYRVVSVLTVLHQDWLNGKEYKCKVSNKALPAPIEKTISKAKGQPREPQVYTLPPSRDELTKNQVSLTCLVKGFYPSDIAVEWESNGQPENNYKTTPPVLDSDGSFFLYSKLTVDKSRWQQGNVFSCSVMHEALHNHYTQKSLSLSPGK

SEQ ID NO: 247 - protein, 449 aa, synthetic construct
  REGION 1..449: note = Description of Artificial Sequence: Synthetic polypeptide
QVQLVQSGAEVKKPGASVKVSCKASGYTFTTYWITWVRQAPGQGLEWMGDIYPGSSISNYNEKFKSRVTMTVDTSTSTVYMELSSLRSEDTAVYYCAREDGYDAWFAYWGQGTLVTVSSASTKGPSVFPLAPSSKSTSGGTAALGCLVKDYFPEPVTVSWNSGALTSGVHTFPAVLQSSGLYSLSSVVTVPSSSLGTQTYICNVNHKPSNTKVDKKVEPKSCDKTHTCPPCPAPELLGGPSVFLFPPKPKDTLMISRTPEVTCVVVDVSHEDPEVKFNWYVDGVEVHNAKTKPREEQYNSTYRVVSVLTVLHQDWLNGKEYKCKVSNKALPAPIEKTISKAKGQPREPQVYTLPPSRDELTKNQVSLTCLVKGFYPSDIAVEWESNGQPENNYKTTPPVLDSDGSFFLYSKLTVDKSRWQQGNVFSCSVMHEALHNHYTQKSLSLSPGK

SEQ ID NO: 248 - DNA, 57 bp, synthetic construct; identical to SEQ ID NO: 203
  misc_feature 1..57: note = Description of Artificial Sequence: Synthetic oligonucleotide
  source 1..57: mol_type = other DNA

SEQ ID NO: 249 - DNA, 357 bp, synthetic construct
  misc_feature 1..357: note = Description of Artificial Sequence: Synthetic polynucleotide
  source 1..357: mol_type = other DNA
caggtgcagctggtgcagtctggcgccgaagtgaagaaacctggcgcctccgtgaaggtgtcctgcaaggcttccggctacacctttaccacctactggatcacctgggtgcgacaggctcctggacagggcctggaatggatgggcgacatctaccccggctcctccatctccaactacaacgagaagttcaagtcccgcgtgaccatgaccgtggacacctccaccagcaccgtgtacatggaactgtcctccctgcggagcgaggacaccgccgtgtactactgcgctagagaggacggctacgacgcttggtttgcctactggggccagggcaccctcgtgaccgtgtcatct

SEQ ID NO: 250 - protein, 119 aa, synthetic construct
  REGION 1..119: note = Description of Artificial Sequence: Synthetic polypeptide
QVQLVQSGAEVKKPGASVKVSCKASGYTFTTYWITWVRQAPGQGLEWMGDIYPGSSISNYNEKFKSRVTMTVDTSTSTVYMELSSLRSEDTAVYYCAREDGYDAWFAYWGQGTLVTVSS

SEQ ID NO: 251 - DNA, 987 bp, synthetic construct; identical to SEQ ID NO: 206
  misc_feature 1..987: note = Description of Artificial Sequence: Synthetic polynucleotide
  source 1..987: mol_type = other DNA

SEQ ID NO: 252 - protein, 330 aa, synthetic construct [sequence omitted]

SEQ ID NO: 253 - DNA, 1407 bp, synthetic construct
  misc_feature 1..1407: note = Description of Artificial Sequence: Synthetic polynucleotide
  source 1..1407: mol_type = other DNA
atgggctggtcctgcatcatcctgtttctggtggccaccgccaccggcgtgcacagccaggtgcagctggtgcagtctggcgccgaagtgaagaaacctggcgcctccgtgaaggtgtcctgcaaggcttccggctacacctttaccacctactggatcacctgggtgcgacaggctcctggacagggcctggaatggatgggcgacatctaccccggctcctccatctccaactacgcccagaagttccagggccgcgtgaccatgaccgtggacacctccaccagcaccgtgtacatggaactgtcctccctgcggagcgaggacaccgccgtgtactactgcgctagagaggacggctacgacgcttggtttgcctactggggccagggcaccctcgtgaccgtgtcatctgcatccaccaagggcccatcggtcttccccctggcaccctcctccaagagcacctctgggggcacagcggccctgggctgcctggtcaaggactacttccccgaaccggtgacggtgtcgtggaactcaggcgccctgaccagcggcgtgcacaccttcccggctgtcctacagtcctcaggactctactccctcagcagcgtggtgaccgtgccctccagcagcttgggcacccagacctacatctgcaacgtgaatcacaagcccagcaacaccaaggtggacaagaaagttgagcccaaatcttgtgacaaaactcacacatgcccaccgtgcccagcacctgaactcctggggggaccgtcagtcttcctcttccccccaaaacccaaggacaccctcatgatctcccggacccctgaggtcacatgcgtggtggtggacgtgagccacgaagaccctgaggtcaagttcaactggtacgtggacggcgtggaggtgcataatgccaagacaaagccgcgggaggagcagtacaacagcacgtaccgtgtggtcagcgtcctcaccgtcctgcaccaggactggctgaatggcaaggagtacaagtgcaaggtctccaacaaagccctcccagcccccatcgagaaaaccatctccaaagccaaagggcagccccgagaaccacaggtgtacaccctgcccccatcccgggatgagctgaccaagaaccaggtcagcctgacctgcctggtcaaaggcttctatcccagcgacatcgccgtggagtgggagagcaatgggcagccggagaacaactacaagaccacgcctcccgtgctggactccgacggctccttcttcttatattcaaagctcaccgtggacaagagcaggtggcagcaggggaacgtcttctcatgctccgtgatgcatgaggctctgcacaaccactacacgcagaagagcctctccctgtctcccgggaaatga

SEQ ID NO: 254 - DNA, 1350 bp, synthetic construct
  misc_feature 1..1350: note = Description of Artificial Sequence: Synthetic polynucleotide
  source 1..1350: mol_type = other DNA
caggtgcagctggtgcagtctggcgccgaagtgaagaaacctggcgcctccgtgaaggtgtcctgcaaggcttccggctacacctttaccacctactggatcacctgggtgcgacaggctcctggacagggcctggaatggatgggcgacatctaccccggctcctccatctccaactacgcccagaagttccagggccgcgtgaccatgaccgtggacacctccaccagcaccgtgtacatggaactgtcctccctgcggagcgaggacaccgccgtgtactactgcgctagagaggacggctacgacgcttggtttgcctactggggccagggcaccctcgtgaccgtgtcatctgcatccaccaagggcccatcggtcttccccctggcaccctcctccaagagcacctctgggggcacagcggccctgggctgcctggtcaaggactacttccccgaaccggtgacggtgtcgtggaactcaggcgccctgaccagcggcgtgcacaccttcccggctgtcctacagtcctcaggactctactccctcagcagcgtggtgaccgtgccctccagcagcttgggcacccagacctacatctgcaacgtgaatcacaagcccagcaacaccaaggtggacaagaaagttgagcccaaatcttgtgacaaaactcacacatgcccaccgtgcccagcacctgaactcctggggggaccgtcagtcttcctcttccccccaaaacccaaggacaccctcatgatctcccggacccctgaggtcacatgcgtggtggtggacgtgagccacgaagaccctgaggtcaagttcaactggtacgtggacggcgtggaggtgcataatgccaagacaaagccgcgggaggagcagtacaacagcacgtaccgtgtggtcagcgtcctcaccgtcctgcaccaggactggctgaatggcaaggagtacaagtgcaaggtctccaacaaagccctcccagcccccatcgagaaaaccatctccaaagccaaagggcagccccgagaaccacaggtgtacaccctgcccccatcccgggatgagctgaccaagaaccaggtcagcctgacctgcctggtcaaaggcttctatcccagcgacatcgccgtggagtgggagagcaatgggcagccggagaacaactacaagaccacgcctcccgtgctggactccgacggctccttcttcttatattcaaagctcaccgtggacaagagcaggtggcagcaggggaacgtcttctcatgctccgtgatgcatgaggctctgcacaaccactacacgcagaagagcctctccctgtctcccgggaaatga

SEQ ID NO: 255 - protein, 468 aa, synthetic construct
  REGION 1..468: note = Description of Artificial Sequence: Synthetic polypeptide
MGWSCIILFLVATATGVHSQVQLVQSGAEVKKPGASVKVSCKASGYTFTTYWITWVRQAPGQGLEWMGDIYPGSSISNYAQKFQGRVTMTVDTSTSTVYMELSSLRSEDTAVYYCAREDGYDAWFAYWGQGTLVTVSSASTKGPSVFPLAPSSKSTSGGTAALGCLVKDYFPEPVTVSWNSGALTSGVHTFPAVLQSSGLYSLSSVVTVPSSSLGTQTYICNVNHKPSNTKVDKKVEPKSCDKTHTCPPCPAPELLGGPSVFLFPPKPKDTLMISRTPEVTCVVVDVSHEDPEVKFNWYVDGVEVHNAKTKPREEQYNSTYRVVSVLTVLHQDWLNGKEYKCKVSNKALPAPIEKTISKAKGQPREPQVYTLPPSRDELTKNQVSLTCLVKGFYPSDIAVEWESNGQPENNYKTTPPVLDSDGSFFLYSKLTVDKSRWQQGNVFSCSVMHEALHNHYTQKSLSLSPGK

SEQ ID NO: 256 - protein, 449 aa, synthetic construct
  REGION 1..449: note = Description of Artificial Sequence: Synthetic polypeptide
QVQLVQSGAEVKKPGASVKVSCKASGYTFTTYWITWVRQAPGQGLEWMGDIYPGSSISNYAQKFQGRVTMTVDTSTSTVYMELSSLRSEDTAVYYCAREDGYDAWFAYWGQGTLVTVSSASTKGPSVFPLAPSSKSTSGGTAALGCLVKDYFPEPVTVSWNSGALTSGVHTFPAVLQSSGLYSLSSVVTVPSSSLGTQTYICNVNHKPSNTKVDKKVEPKSCDKTHTCPPCPAPELLGGPSVFLFPPKPKDTLMISRTPEVTCVVVDVSHEDPEVKFNWYVDGVEVHNAKTKPREEQYNSTYRVVSVLTVLHQDWLNGKEYKCKVSNKALPAPIEKTISKAKGQPREPQVYTLPPSRDELTKNQVSLTCLVKGFYPSDIAVEWESNGQPENNYKTTPPVLDSDGSFFLYSKLTVDKSRWQQGNVFSCSVMHEALHNHYTQKSLSLSPGK

SEQ ID NO: 257 - DNA, 57 bp, synthetic construct; identical to SEQ ID NO: 203
  misc_feature 1..57: note = Description of Artificial Sequence: Synthetic oligonucleotide
  source 1..57: mol_type = other DNA

SEQ ID NO: 258 - DNA, 357 bp, synthetic construct
  misc_feature 1..357: note = Description of Artificial Sequence: Synthetic polynucleotide
  source 1..357: mol_type = other DNA
caggtgcagctggtgcagtctggcgccgaagtgaagaaacctggcgcctccgtgaaggtgtcctgcaaggcttccggctacacctttaccacctactggatcacctgggtgcgacaggctcctggacagggcctggaatggatgggcgacatctaccccggctcctccatctccaactacgcccagaagttccagggccgcgtgaccatgaccgtggacacctccaccagcaccgtgtacatggaactgtcctccctgcggagcgaggacaccgccgtgtactactgcgctagagaggacggctacgacgcttggtttgcctactggggccagggcaccctcgtgaccgtgtcatct

SEQ ID NO: 259 - protein, 119 aa, synthetic construct
  REGION 1..119: note = Description of Artificial Sequence: Synthetic polypeptide
QVQLVQSGAEVKKPGASVKVSCKASGYTFTTYWITWVRQAPGQGLEWMGDIYPGSSISNYAQKFQGRVTMTVDTSTSTVYMELSSLRSEDTAVYYCAREDGYDAWFAYWGQGTLVTVSS

SEQ ID NO: 260 - DNA, 987 bp, synthetic construct; identical to SEQ ID NO: 206
  misc_feature 1..987: note = Description of Artificial Sequence: Synthetic polynucleotide
  source 1..987: mol_type = other DNA

SEQ ID NO: 261 - protein, 330 aa, synthetic construct [sequence omitted]

SEQ ID NO: 262 - DNA, 1407 bp, synthetic construct
  misc_feature 1..1407: note = Description of Artificial Sequence: Synthetic polynucleotide
  source 1..1407: mol_type = other DNA
atgggctggtcctgcatcatcctgtttctggtggccaccgccaccggcgtgcacagccaggtgcagctggtgcagtctggcgccgaagtgaagaaacctggcgcctccgtgaaggtgtcctgcaaggcttccggctacacctttaccacctactggatcacctgggtgcgacaggctcctggacagggcctggaatggatgggcgacatctaccccggctcctccatctccaactacgcccagaagttccagggccgcgtgaccatgacccgggacacctccaccagcaccgtgtacatggaactgtcctccctgcggagcgaggacaccgccgtgtactactgcgctagagaggacggctacgacgcttggtttgcctactggggccagggcaccctcgtgaccgtgtcatctgcatccaccaagggcccatcggtcttccccctggcaccctcctccaagagcacctctgggggcacagcggccctgggctgcctggtcaaggactacttccccgaaccggtgacggtgtcgtggaactcaggcgccctgaccagcggcgtgcacaccttcccggctgtcctacagtcctcaggactctactccctcagcagcgtggtgaccgtgccctccagcagcttgggcacccagacctacatctgcaacgtgaatcacaagcccagcaacaccaaggtggacaagaaagttgagcccaaatcttgtgacaaaactcacacatgcccaccgtgcccagcacctgaactcctggggggaccgtcagtcttcctcttccccccaaaacccaaggacaccctcatgatctcccggacccctgaggtcacatgcgtggtggtggacgtgagccacgaagaccctgaggtcaagttcaactggtacgtggacggcgtggaggtgcataatgccaagacaaagccgcgggaggagcagtacaacagcacgtaccgtgtggtcagcgtcctcaccgtcctgcaccaggactggctgaatggcaaggagtacaagtgcaaggtctccaacaaagccctcccagcccccatcgagaaaaccatctccaaagccaaagggcagccccgagaaccacaggtgtacaccctgcccccatcccgggatgagctgaccaagaaccaggtcagcctgacctgcctggtcaaaggcttctatcccagcgacatcgccgtggagtgggagagcaatgggcagccggagaacaactacaagaccacgcctcccgtgctggactccgacggctccttcttcttatattcaaagctcaccgtggacaagagcaggtggcagcaggggaacgtcttctcatgctccgtgatgcatgaggctctgcacaaccactacacgcagaagagcctctccctgtctcccgggaaatga

SEQ ID NO: 263 - DNA, 1350 bp, synthetic construct
  misc_feature 1..1350: note = Description of Artificial Sequence: Synthetic polynucleotide
  source 1..1350: mol_type = other DNA
caggtgcagctggtgcagtctggcgccgaagtgaagaaacctggcgcctccgtgaaggtgtcctgcaaggcttccggctacacctttaccacctactggatcacctgggtgcgacaggctcctggacagggcctggaatggatgggcgacatctaccccggctcctccatctccaactacgcccagaagttccagggccgcgtgaccatgacccgggacacctccaccagcaccgtgtacatggaactgtcctccctgcggagcgaggacaccgccgtgtactactgcgctagagaggacggctacgacgcttggtttgcctactggggccagggcaccctcgtgaccgtgtcatctgcatccaccaagggcccatcggtcttccccctggcaccctcctccaagagcacctctgggggcacagcggccctgggctgcctggtcaaggactacttccccgaaccggtgacggtgtcgtggaactcaggcgccctgaccagcggcgtgcacaccttcccggctgtcctacagtcctcaggactctactccctcagcagcgtggtgaccgtgccctccagcagcttgggcacccagacctacatctgcaacgtgaatcacaagcccagcaacaccaaggtggacaagaaagttgagcccaaatcttgtgacaaaactcacacatgcccaccgtgcccagcacctgaactcctggggggaccgtcagtcttcctcttccccccaaaacccaaggacaccctcatgatctcccggacccctgaggtcacatgcgtggtggtggacgtgagccacgaagaccctgaggtcaagttcaactggtacgtggacggcgtggaggtgcataatgccaagacaaagccgcgggaggagcagtacaacagcacgtaccgtgtggtcagcgtcctcaccgtcctgcaccaggactggctgaatggcaaggagtacaagtgcaaggtctccaacaaagccctcccagcccccatcgagaaaaccatctccaaagccaaagggcagccccgagaaccacaggtgtacaccctgcccccatcccgggatgagctgaccaagaaccaggtcagcctgacctgcctggtcaaaggcttctatcccagcgacatcgccgtggagtgggagagcaatgggcagccggagaacaactacaagaccacgcctcccgtgctggactccgacggctccttcttcttatattcaaagctcaccgtggacaagagcaggtggcagcaggggaacgtcttctcatgctccgtgatgcatgaggctctgcacaaccactacacgcagaagagcctctccctgtctcccgggaaatga

SEQ ID NO: 264 - protein, 468 aa, synthetic construct
  REGION 1..468: note = Description of Artificial Sequence: Synthetic polypeptide
MGWSCIILFLVATATGVHSQVQLVQSGAEVKKPGASVKVSCKASGYTFTTYWITWVRQAPGQGLEWMGDIYPGSSISNYAQKFQGRVTMTRDTSTSTVYMELSSLRSEDTAVYYCAREDGYDAWFAYWGQGTLVTVSSASTKGPSVFPLAPSSKSTSGGTAALGCLVKDYFPEPVTVSWNSGALTSGVHTFPAVLQSSGLYSLSSVVTVPSSSLGTQTYICNVNHKPSNTKVDKKVEPKSCDKTHTCPPCPAPELLGGPSVFLFPPKPKDTLMISRTPEVTCVVVDVSHEDPEVKFNWYVDGVEVHNAKTKPREEQYNSTYRVVSVLTVLHQDWLNGKEYKCKVSNKALPAPIEKTISKAKGQPREPQVYTLPPSRDELTKNQVSLTCLVKGFYPSDIAVEWESNGQPENNYKTTPPVLDSDGSFFLYSKLTVDKSRWQQGNVFSCSVMHEALHNHYTQKSLSLSPGK

SEQ ID NO: 265 - protein, 449 aa, synthetic construct
  REGION 1..449: note = Description of Artificial Sequence: Synthetic polypeptide
QVQLVQSGAEVKKPGASVKVSCKASGYTFTTYWITWVRQAPGQGLEWMGDIYPGSSISNYAQKFQGRVTMTRDTSTSTVYMELSSLRSEDTAVYYCAREDGYDAWFAYWGQGTLVTVSSASTKGPSVFPLAPSSKSTSGGTAALGCLVKDYFPEPVTVSWNSGALTSGVHTFPAVLQSSGLYSLSSVVTVPSSSLGTQTYICNVNHKPSNTKVDKKVEPKSCDKTHTCPPCPAPELLGGPSVFLFPPKPKDTLMISRTPEVTCVVVDVSHEDPEVKFNWYVDGVEVHNAKTKPREEQYNSTYRVVSVLTVLHQDWLNGKEYKCKVSNKALPAPIEKTISKAKGQPREPQVYTLPPSRDELTKNQVSLTCLVKGFYPSDIAVEWESNGQPENNYKTTPPVLDSDGSFFLYSKLTVDKSRWQQGNVFSCSVMHEALHNHYTQKSLSLSPGK

SEQ ID NO: 266 - DNA, 57 bp, synthetic construct; identical to SEQ ID NO: 203
  misc_feature 1..57: note = Description of Artificial Sequence: Synthetic oligonucleotide
  source 1..57: mol_type = other DNA

SEQ ID NO: 267 - DNA, 357 bp, synthetic construct
  misc_feature 1..357: note = Description of Artificial Sequence: Synthetic polynucleotide
  source 1..357: mol_type = other DNA
caggtgcagctggtgcagtctggcgccgaagtgaagaaacctggcgcctccgtgaaggtgtcctgcaaggcttccggctacacctttaccacctactggatcacctgggtgcgacaggctcctggacagggcctggaatggatgggcgacatctaccccggctcctccatctccaactacgcccagaagttccagggccgcgtgaccatgacccgggacacctccaccagcaccgtgtacatggaactgtcctccctgcggagcgaggacaccgccgtgtactactgcgctagagaggacggctacgacgcttggtttgcctactggggccagggcaccctcgtgaccgtgtcatct

SEQ ID NO: 268 - protein, 119 aa, synthetic construct
  REGION 1..119: note = Description of Artificial Sequence: Synthetic polypeptide
QVQLVQSGAEVKKPGASVKVSCKASGYTFTTYWITWVRQAPGQGLEWMGDIYPGSSISNYAQKFQGRVTMTRDTSTSTVYMELSSLRSEDTAVYYCAREDGYDAWFAYWGQGTLVTVSS

SEQ ID NO: 269 - DNA, 987 bp, synthetic construct; identical to SEQ ID NO: 206
  misc_feature 1..987: note = Description of Artificial Sequence: Synthetic polynucleotide
  source 1..987: mol_type = other DNA

SEQ ID NO: 270 - protein, 330 aa, synthetic construct [sequence omitted]

SEQ ID NO: 271 - DNA, 1407 bp, synthetic construct
  misc_feature 1..1407: note = Description of Artificial Sequence: Synthetic polynucleotide
  source 1..1407: mol_type = other DNA
atgggctggtcctgcatcatcctgtttctggtggccaccgccaccggcgtgcacagccaggtgcagctggtgcagtctggcgccgaagtgaagaaacctggcgcctccgtgaaggtgtcctgcaaggcttccggctacacctttaccacctactggatcacctgggtgcgacaggctcctggacagggcctggaatggatgggcgacatctaccccggctcctccatctgcaactacgcccagaagttccagggccgcgtgaccatgaccgtggacacctccaccagcaccgtgtacatggaactgtcctccctgcggagcgaggacaccgccgtgtactactgcgctagagaggacggctacgacgcttggtttgcctactggggccagggcaccctcgtgaccgtgtcatctgcatccaccaagggcccatcggtcttccccctggcaccctcctccaagagcacctctgggggcacagcggccctgggctgcctggtcaaggactacttccccgaaccggtgacggtgtcgtggaactcaggcgccctgaccagcggcgtgcacaccttcccggctgtcctacagtcctcaggactctactccctcagcagcgtggtgaccgtgccctccagcagcttgggcacccagacctacatctgcaacgtgaatcacaagcccagcaacaccaaggtggacaagaaagttgagcccaaatcttgtgacaaaactcacacatgcccaccgtgcccagcacctgaactcctggggggaccgtcagtcttcctcttccccccaaaacccaaggacaccctcatgatctcccggacccctgaggtcacatgcgtggtggtggacgtgagccacgaagaccctgaggtcaagttcaactggtacgtggacggcgtggaggtgcataatgccaagacaaagccgcgggaggagcagtacaacagcacgtaccgtgtggtcagcgtcctcaccgtcctgcaccaggactggctgaatggcaaggagtacaagtgcaaggtctccaacaaagccctcccagcccccatcgagaaaaccatctccaaagccaaagggcagccccgagaaccacaggtgtacaccctgcccccatcccgggatgagctgaccaagaaccaggtcagcctgacctgcctggtcaaaggcttctatcccagcgacatcgccgtggagtgggagagcaatgggcagccggagaacaactacaagaccacgcctcccgtgctggactccgacggctccttcttcttatattcaaagctcaccgtggacaagagcaggtggcagcaggggaacgtcttctcatgctccgtgatgcatgaggctctgcacaaccactacacgcagaagagcctctccctgtctcccgggaaatga

SEQ ID NO: 272 - DNA, 1350 bp, synthetic construct
  misc_feature 1..1350: note = Description of Artificial Sequence: Synthetic polynucleotide
  source 1..1350: mol_type = other DNA
caggtgcagctggtgcagtctggcgccgaagtgaagaaacctggcgcctccgtgaaggtgtcctgcaaggcttccggctacacctttaccacctactggatcacctgggtgcgacaggctcctggacagggcctggaatggatgggcgacatctaccccggctcctccatctgcaactacgcccagaagttccagggccgcgtgaccatgaccgtggacacctccaccagcaccgtgtacatggaactgtcctccctgcggagcgaggacaccgccgtgtactactgcgctagagaggacggctacgacgcttggtttgcctactggggccagggcaccctcgtgaccgtgtcatctgcatccaccaagggcccatcggtcttccccctggcaccctcctccaagagcacctctgggggcacagcggccctgggctgcctggtcaaggactacttccccgaaccggtgacggtgtcgtggaactcaggcgccctgaccagcggcgtgcacaccttcccggctgtcctacagtcctcaggactctactccctcagcagcgtggtgaccgtgccctccagcagcttgggcacccagacctacatctgcaacgtgaatcacaagcccagcaacaccaaggtggacaagaaagttgagcccaaatcttgtgacaaaactcacacatgcccaccgtgcccagcacctgaactcctggggggaccgtcagtcttcctcttccccccaaaacccaaggacaccctcatgatctcccggacccctgaggtcacatgcgtggtggtggacgtgagccacgaagaccctgaggtcaagttcaactggtacgtggacggcgtggaggtgcataatgccaagacaaagccgcgggaggagcagtacaacagcacgtaccgtgtggtcagcgtcctcaccgtcctgcaccaggactggctgaatggcaaggagtacaagtgcaaggtctccaacaaagccctcccagcccccatcgagaaaaccatctccaaagccaaagggcagccccgagaaccacaggtgtacaccctgcccccatcccgggatgagctgaccaagaaccaggtcagcctgacctgcctggtcaaaggcttctatcccagcgacatcgccgtggagtgggagagcaatgggcagccggagaacaactacaagaccacgcctcccgtgctggactccgacggctccttcttcttatattcaaagctcaccgtggacaagagcaggtggcagcaggggaacgtcttctcatgctccgtgatgcatgaggctctgcacaaccactacacgcagaagagcctctccctgtctcccgggaaatga

SEQ ID NO: 273 - protein, 468 aa, synthetic construct
  REGION 1..468: note = Description of Artificial Sequence: Synthetic polypeptide
MGWSCIILFLVATATGVHSQVQLVQSGAEVKKPGASVKVSCKASGYTFTTYWITWVRQAPGQGLEWMGDIYPGSSICNYAQKFQGRVTMTVDTSTSTVYMELSSLRSEDTAVYYCAREDGYDAWFAYWGQGTLVTVSSASTKGPSVFPLAPSSKSTSGGTAALGCLVKDYFPEPVTVSWNSGALTSGVHTFPAVLQSSGLYSLSSVVTVPSSSLGTQTYICNVNHKPSNTKVDKKVEPKSCDKTHTCPPCPAPELLGGPSVFLFPPKPKDTLMISRTPEVTCVVVDVSHEDPEVKFNWYVDGVEVHNAKTKPREEQYNSTYRVVSVLTVLHQDWLNGKEYKCKVSNKALPAPIEKTISKAKGQPREPQVYTLPPSRDELTKNQVSLTCLVKGFYPSDIAVEWESNGQPENNYKTTPPVLDSDGSFFLYSKLTVDKSRWQQGNVFSCSVMHEALHNHYTQKSLSLSPGK

SEQ ID NO: 274 - protein, 449 aa, synthetic construct
  REGION 1..449: note = Description of Artificial Sequence: Synthetic polypeptide
QVQLVQSGAEVKKPGASVKVSCKASGYTFTTYWITWVRQAPGQGLEWMGDIYPGSSICNYAQKFQGRVTMTVDTSTSTVYMELSSLRSEDTAVYYCAREDGYDAWFAYWGQGTLVTVSSASTKGPSVFPLAPSSKSTSGGTAALGCLVKDYFPEPVTVSWNSGALTSGVHTFPAVLQSSGLYSLSSVVTVPSSSLGTQTYICNVNHKPSNTKVDKKVEPKSCDKTHTCPPCPAPELLGGPSVFLFPPKPKDTLMISRTPEVTCVVVDVSHEDPEVKFNWYVDGVEVHNAKTKPREEQYNSTYRVVSVLTVLHQDWLNGKEYKCKVSNKALPAPIEKTISKAKGQPREPQVYTLPPSRDELTKNQVSLTCLVKGFYPSDIAVEWESNGQPENNYKTTPPVLDSDGSFFLYSKLTVDKSRWQQGNVFSCSVMHEALHNHYTQKSLSLSPGK

SEQ ID NO: 275 - DNA, 57 bp, synthetic construct; identical to SEQ ID NO: 203
  misc_feature 1..57: note = Description of Artificial Sequence: Synthetic oligonucleotide
  source 1..57: mol_type = other DNA

SEQ ID NO: 276 - DNA, 357 bp, synthetic construct
  misc_feature 1..357: note = Description of Artificial Sequence: Synthetic polynucleotide
  source 1..357: mol_type = other DNA
caggtgcagctggtgcagtctggcgccgaagtgaagaaacctggcgcctccgtgaaggtgtcctgcaaggcttccggctacacctttaccacctactggatcacctgggtgcgacaggctcctggacagggcctggaatggatgggcgacatctaccccggctcctccatctgcaactacgcccagaagttccagggccgcgtgaccatgaccgtggacacctccaccagcaccgtgtacatggaactgtcctccctgcggagcgaggacaccgccgtgtactactgcgctagagaggacggctacgacgcttggtttgcctactggggccagggcaccctcgtgaccgtgtcatct

SEQ ID NO: 277 - protein, 119 aa, synthetic construct
  REGION 1..119: note = Description of Artificial Sequence: Synthetic polypeptide
QVQLVQSGAEVKKPGASVKVSCKASGYTFTTYWITWVRQAPGQGLEWMGDIYPGSSICNYAQKFQGRVTMTVDTSTSTVYMELSSLRSEDTAVYYCAREDGYDAWFAYWGQGTLVTVSS

SEQ ID NO: 278 - DNA, 987 bp, synthetic construct; identical to SEQ ID NO: 206
  misc_feature 1..987: note = Description of Artificial Sequence: Synthetic polynucleotide
  source 1..987: mol_type = other DNA

SEQ ID NO: 279 - protein, 330 aa, synthetic construct [sequence omitted]

SEQ ID NO: 280 - DNA, 1407 bp, synthetic construct
  misc_feature 1..1407: note = Description of Artificial Sequence: Synthetic polynucleotide
  source 1..1407: mol_type = other DNA
atgggctggtcctgcatcatcctgtttctggtggccaccgccaccggcgtgcacagccaggtgcagctggtgcagtctggcgccgaagtgaagaaacctggcgcctccgtgaaggtgtcctgcaaggcttccggctacacctttaccacctactggatcacctgggtgcgacaggctcctggacagggcctggaatggatgggcgacatctaccccggctcctccatctgcaactacgcccagaagttccagggccgcgtgaccatgacccgggacacctccaccagcaccgtgtacatggaactgtcctccctgcggagcgaggacaccgccgtgtactactgcgctagagaggacggctacgacgcttggtttgcctactggggccagggcaccctcgtgaccgtgtcatctgcatccaccaagggcccatcggtcttccccctggcaccctcctccaagagcacctctgggggcacagcggccctgggctgcctggtcaaggactacttccccgaaccggtgacggtgtcgtggaactcaggcgccctgaccagcggcgtgcacaccttcccggctgtcctacagtcctcaggactctactccctcagcagcgtggtgaccgtgccctccagcagcttgggcacccagacctacatctgcaacgtgaatcacaagcccagcaacaccaaggtggacaagaaagttgagcccaaatcttgtgacaaaactcacacatgcccaccgtgcccagcacctgaactcctggggggaccgtcagtcttcctcttccccccaaaacccaaggacaccctcatgatctcccggacccctgaggtcacatgcgtggtggtggacgtgagccacgaagaccctgaggtcaagttcaactggtacgtggacggcgtggaggtgcataatgccaagacaaagccgcgggaggagcagtacaacagcacgtaccgtgtggtcagcgtcctcaccgtcctgcaccaggactggctgaatggcaaggagtacaagtgcaaggtctccaacaaagccctcccagcccccatcgagaaaaccatctccaaagccaaagggcagccccgagaaccacaggtgtacaccctgcccccatcccgggatgagctgaccaagaaccaggtcagcctgacctgcctggtcaaaggcttctatcccagcgacatcgccgtggagtgggagagcaatgggcagccggagaacaactacaagaccacgcctcccgtgctggactccgacggctccttcttcttatattcaaagctcaccgtggacaagagcaggtggcagcaggggaacgtcttctcatgctccgtgatgcatgaggctctgcacaaccactacacgcagaagagcctctccctgtctcccgggaaatga

SEQ ID NO: 281 - DNA, 1350 bp, synthetic construct
  misc_feature 1..1350: note = Description of Artificial Sequence: Synthetic polynucleotide
  source 1..1350: mol_type = other DNA
caggtgcagctggtgcagtctggcgccgaagtgaagaaacctggcgcctccgtgaaggtgtcctgcaaggcttccggctacacctttaccacctactggatcacctgggtgcgacaggctcctggacagggcctggaatggatgggcgacatctaccccggctcctccatctgcaactacgcccagaagttccagggccgcgtgaccatgacccgggacacctccaccagcaccgtgtacatggaactgtcctccctgcggagcgaggacaccgccgtgtactactgcgctagagaggacggctacgacgcttggtttgcctactggggccagggcaccctcgtgaccgtgtcatctgcatccaccaagggcccatcggtcttccccctggcaccctcctccaagagcacctctgggggcacagcggccctgggctgcctggtcaaggactacttccccgaaccggtgacggtgtcgtggaactcaggcgccctgaccagcggcgtgcacaccttcccggctgtcctacagtcctcaggactctactccctcagcagcgtggtgaccgtgccctccagcagcttgggcacccagacctacatctgcaacgtgaatcacaagcccagcaacaccaaggtggacaagaaagttgagcccaaatcttgtgacaaaactcacacatgcccaccgtgcccagcacctgaactcctggggggaccgtcagtcttcctcttccccccaaaacccaaggacaccctcatgatctcccggacccctgaggtcacatgcgtggtggtggacgtgagccacgaagaccctgaggtcaagttcaactggtacgtggacggcgtggaggtgcataatgccaagacaaagccgcgggaggagcagtacaacagcacgtaccgtgtggtcagcgtcctcaccgtcctgcaccaggactggctgaatggcaaggagtacaagtgcaaggtctccaacaaagccctcccagcccccatcgagaaaaccatctccaaagccaaagggcagccccgagaaccacaggtgtacaccctgcccccatcccgggatgagctgaccaagaaccaggtcagcctgacctgcctggtcaaaggcttctatcccagcgacatcgccgtggagtgggagagcaatgggcagccggagaacaactacaagaccacgcctcccgtgctggactccgacggctccttcttcttatattcaaagctcaccgtggacaagagcaggtggcagcaggggaacgtcttctcatgctccgtgatgcatgaggctctgcacaaccactacacgcagaagagcctctccctgtctcccgggaaatga

SEQ ID NO: 282 - protein, 468 aa, synthetic construct
  REGION 1..468: note = Description of Artificial Sequence: Synthetic polypeptide
MGWSCIILFLVATATGVHSQVQLVQSGAEVKKPGASVKVSCKASGYTFTTYWITWVRQAPGQGLEWMGDIYPGSSICNYAQKFQGRVTMTRDTSTSTVYMELSSLRSEDTAVYYCAREDGYDAWFAYWGQGTLVTVSSASTKGPSVFPLAPSSKSTSGGTAALGCLVKDYFPEPVTVSWNSGALTSGVHTFPAVLQSSGLYSLSSVVTVPSSSLGTQTYICNVNHKPSNTKVDKKVEPKSCDKTHTCPPCPAPELLGGPSVFLFPPKPKDTLMISRTPEVTCVVVDVSHEDPEVKFNWYVDGVEVHNAKTKPREEQYNSTYRVVSVLTVLHQDWLNGKEYKCKVSNKALPAPIEKTISKAKGQPREPQVYTLPPSRDELTKNQVSLTCLVKGFYPSDIAVEWESNGQPENNYKTTPPVLDSDGSFFLYSKLTVDKSRWQQGNVFSCSVMHEALHNHYTQKSLSLSPGK

SEQ ID NO: 283 - protein, 449 aa, synthetic construct
  REGION 1..449: note = Description of Artificial Sequence: Synthetic polypeptide
QVQLVQSGAEVKKPGASVKVSCKASGYTFTTYWITWVRQAPGQGLEWMGDIYPGSSICNYAQKFQGRVTMTRDTSTSTVYMELSSLRSEDTAVYYCAREDGYDAWFAYWGQGTLVTVSSASTKGPSVFPLAPSSKSTSGGTAALGCLVKDYFPEPVTVSWNSGALTSGVHTFPAVLQSSGLYSLSSVVTVPSSSLGTQTYICNVNHKPSNTKVDKKVEPKSCDKTHTCPPCPAPELLGGPSVFLFPPKPKDTLMISRTPEVTCVVVDVSHEDPEVKFNWYVDGVEVHNAKTKPREEQYNSTYRVVSVLTVLHQDWLNGKEYKCKVSNKALPAPIEKTISKAKGQPREPQVYTLPPSRDELTKNQVSLTCLVKGFYPSDIAVEWESNGQPENNYKTTPPVLDSDGSFFLYSKLTVDKSRWQQGNVFSCSVMHEALHNHYTQKSLSLSPGK

SEQ ID NO: 284 - DNA, 57 bp, synthetic construct; identical to SEQ ID NO: 203
  misc_feature 1..57: note = Description of Artificial Sequence: Synthetic oligonucleotide
  source 1..57: mol_type = other DNA

SEQ ID NO: 285 - DNA, 357 bp, synthetic construct
  misc_feature 1..357: note = Description of Artificial Sequence: Synthetic polynucleotide
  source 1..357: mol_type = other DNA
caggtgcagctggtgcagtctggcgccgaagtgaagaaacctggcgcctccgtgaaggtgtcctgcaaggcttccggctacacctttaccacctactggatcacctgggtgcgacaggctcctggacagggcctggaatggatgggcgacatctaccccggctcctccatctgcaactacgcccagaagttccagggccgcgtgaccatgacccgggacacctccaccagcaccgtgtacatggaactgtcctccctgcggagcgaggacaccgccgtgtactactgcgctagagaggacggctacgacgcttggtttgcctactggggccagggcaccctcgtgaccgtgtcatct

SEQ ID NO: 286 - protein, 119 aa, synthetic construct
  REGION 1..119: note = Description of Artificial Sequence: Synthetic polypeptide
QVQLVQSGAEVKKPGASVKVSCKASGYTFTTYWITWVRQAPGQGLEWMGDIYPGSSICNYAQKFQGRVTMTRDTSTSTVYMELSSLRSEDTAVYYCAREDGYDAWFAYWGQGTLVTVSS

SEQ ID NO: 287 - DNA, 987 bp, synthetic construct; identical to SEQ ID NO: 206
  misc_feature 1..987: note = Description of Artificial Sequence: Synthetic polynucleotide
  source 1..987: mol_type = other DNA

SEQ ID NO: 288 - protein, 330 aa, synthetic construct [sequence omitted]

SEQ ID NO: 289 - DNA, 1407 bp, synthetic construct
  misc_feature 1..1407: note = Description of Artificial Sequence: Synthetic polynucleotide
  source 1..1407: mol_type = other DNA
atgggctggtcctgcatcatcctgtttctggtggccaccgccaccggcgtgcacagcgaagtgcagctgctggaatctggcggcggactggtgcagcctggcggctctctgagactgtcttgtgccgcctccggctacaccttcaccacctactggatcacctgggtccgacaggctcccggcaagggactggaatgggtgtccgacatctaccccggctcctccatctgcaactacaacgagaagttcaagtcccggttcaccatctcccgggacaactccaagaacaccctgtacctccagatgaactccctgcgggccgaggacaccgccgtgtactactgtgccaaagaggacggctacgacgcttggtttgcctactggggccagggcaccctggtcaccgtgtcatctgcatccaccaagggcccatcggtcttccccctggcaccctcctccaagagcacctctgggggcacagcggccctgggctgcctggtcaaggactacttccccgaaccggtgacggtgtcgtggaactcaggcgccctgaccagcggcgtgcacaccttcccggctgtcctacagtcctcaggactctactccctcagcagcgtggtgaccgtgccctccagcagcttgggcacccagacctacatctgcaacgtgaatcacaagcccagcaacaccaaggtggacaagaaagttgagcccaaatcttgtgacaaaactcacacatgcccaccgtgcccagcacctgaactcctggggggaccgtcagtcttcctcttccccccaaaacccaaggacaccctcatgatctcccggacccctgaggtcacatgcgtggtggtggacgtgagccacgaagaccctgaggtcaagttcaactggtacgtggacggcgtggaggtgcataatgccaagacaaagccgcgggaggagcagtacaacagcacgtaccgtgtggtcagcgtcctcaccgtcctgcaccaggactggctgaatggcaaggagtacaagtgcaaggtctccaacaaagccctcccagcccccatcgagaaaaccatctccaaagccaaagggcagccccgagaaccacaggtgtacaccctgcccccatcccgggatgagctgaccaagaaccaggtcagcctgacctgcctggtcaaaggcttctatcccagcgacatcgccgtggagtgggagagcaatgggcagccggagaacaactacaagaccacgcctcccgtgctggactccgacggctccttcttcttatattcaaagctcaccgtggacaagagcaggtggcagcaggggaacgtcttctcatgctccgtgatgcatgaggctctgcacaaccactacacgcagaagagcctctccctgtctcccgggaaatga

SEQ ID NO: 290 - DNA, 1350 bp, synthetic construct
  misc_feature 1..1350: note = Description of Artificial Sequence: Synthetic polynucleotide
  source 1..1350: mol_type = other DNA
gaagtgcagctgctggaatctggcggcggactggtgcagcctggcggctctctgagactgtcttgtgccgcctccggctacaccttcaccacctactggatcacctgggtccgacaggctcccggcaagggactggaatgggtgtccgacatctaccccggctcctccatctgcaactacaacgagaagttcaagtcccggttcaccatctcccgggacaactccaagaacaccctgtacctccagatgaactccctgcgggccgaggacaccgccgtgtactactgtgccaaagaggacggctacgacgcttggtttgcctactggggccagggcaccctggtcaccgtgtcatctgcatccaccaagggcccatcggtcttccccctggcaccctcctccaagagcacctctgggggcacagcggccctgggctgcctggtcaaggactacttccccgaaccggtgacggtgtcgtggaactcaggcgccctgaccagcggcgtgcacaccttcccggctgtcctacagtcctcaggactctactccctcagcagcgtggtgaccgtgccctccagcagcttgggcacccagacctacatctgcaacgtgaatcacaagcccagcaacaccaaggtggacaagaaagttgagcccaaatcttgtgacaaaactcacacatgcccaccgtgcccagcacctgaactcctggggggaccgtcagtcttcctcttccccccaaaacccaaggacaccctcatgatctcccggacccctgaggtcacatgcgtggtggtggacgtgagccacgaagaccctgaggtcaagttcaactggtacgtggacggcgtggaggtgcataatgccaagacaaagccgcgggaggagcagtacaacagcacgtaccgtgtggtcagcgtcctcaccgtcctgcaccaggactggctgaatggcaaggagtacaagtgcaaggtctccaacaaagccctcccagcccccatcgagaaaaccatctccaaagccaaagggcagccccgagaaccacaggtgtacaccctgcccccatcccgggatgagctgaccaagaaccaggtcagcctgacctgcctggtcaaaggcttctatcccagcgacatcgccgtggagtgggagagcaatgggcagccggagaacaactacaagaccacgcctcccgtgctggactccgacggctccttcttcttatattcaaagctcaccgtggacaagagcaggtggcagcaggggaacgtcttctcatgctccgtgatgcatgaggctctgcacaaccactacacgcagaagagcctctccctgtctcccgggaaatga

SEQ ID NO: 291 - protein, 468 aa, synthetic construct
  REGION 1..468: note = Description of Artificial Sequence: Synthetic polypeptide
MGWSCIILFLVATATGVHSEVQLLESGGGLVQPGGSLRLSCAASGYTFTTYWITWVRQAPGKGLEWVSDIYPGSSICNYNEKFKSRFTISRDNSKNTLYLQMNSLRAEDTAVYYCAKEDGYDAWFAYWGQGTLVTVSSASTKGPSVFPLAPSSKSTSGGTAALGCLVKDYFPEPVTVSWNSGALTSGVHTFPAVLQSSGLYSLSSVVTVPSSSLGTQTYICNVNHKPSNTKVDKKVEPKSCDKTHTCPPCPAPELLGGPSVFLFPPKPKDTLMISRTPEVTCVVVDVSHEDPEVKFNWYVDGVEVHNAKTKPREEQYNSTYRVVSVLTVLHQDWLNGKEYKCKVSNKALPAPIEKTISKAKGQPREPQVYTLPPSRDELTKNQVSLTCLVKGFYPSDIAVEWESNGQPENNYKTTPPVLDSDGSFFLYSKLTVDKSRWQQGNVFSCSVMHEALHNHYTQKSLSLSPGK

SEQ ID NO: 292 - protein, 449 aa, synthetic construct
  REGION 1..449: note = Description of Artificial Sequence: Synthetic polypeptide
EVQLLESGGGLVQPGGSLRLSCAASGYTFTTYWITWVRQAPGKGLEWVSDIYPGSSICNYNEKFKSRFTISRDNSKNTLYLQMNSLRAEDTAVYYCAKEDGYDAWFAYWGQGTLVTVSSASTKGPSVFPLAPSSKSTSGGTAALGCLVKDYFPEPVTVSWNSGALTSGVHTFPAVLQSSGLYSLSSVVTVPSSSLGTQTYICNVNHKPSNTKVDKKVEPKSCDKTHTCPPCPAPELLGGPSVFLFPPKPKDTLMISRTPEVTCVVVDVSHEDPEVKFNWYVDGVEVHNAKTKPREEQYNSTYRVVSVLTVLHQDWLNGKEYKCKVSNKALPAPIEKTISKAKGQPREPQVYTLPPSRDELTKNQVSLTCLVKGFYPSDIAVEWESNGQPENNYKTTPPVLDSDGSFFLYSKLTVDKSRWQQGNVFSCSVMHEALHNHYTQKSLSLSPGK

SEQ ID NO: 293 - DNA, 57 bp, synthetic construct; identical to SEQ ID NO: 203
  misc_feature 1..57: note = Description of Artificial Sequence: Synthetic oligonucleotide
  source 1..57: mol_type = other DNA

SEQ ID NO: 294 - DNA, 357 bp, synthetic construct
  misc_feature 1..357: note = Description of Artificial Sequence: Synthetic polynucleotide
  source 1..357: mol_type = other DNA
gaagtgcagctgctggaatctggcggcggactggtgcagcctggcggctctctgagactgtcttgtgccgcctccggctacaccttcaccacctactggatcacctgggtccgacaggctcccggcaagggactggaatgggtgtccgacatctaccccggctcctccatctgcaactacaacgagaagttcaagtcccggttcaccatctcccgggacaactccaagaacaccctgtacctccagatgaactccctgcgggccgaggacaccgccgtgtactactgtgccaaagaggacggctacgacgcttggtttgcctactggggccagggcaccctggtcaccgtgtcatct

SEQ ID NO: 295 - protein, 119 aa, synthetic construct
  REGION 1..119: note = Description of Artificial Sequence: Synthetic polypeptide
EVQLLESGGGLVQPGGSLRLSCAASGYTFTTYWITWVRQAPGKGLEWVSDIYPGSSICNYNEKFKSRFTISRDNSKNTLYLQMNSLRAEDTAVYYCAKEDGYDAWFAYWGQGTLVTVSS

SEQ ID NO: 296 - DNA, 987 bp, synthetic construct; identical to SEQ ID NO: 206
  misc_feature 1..987: note = Description of Artificial Sequence: Synthetic polynucleotide
  source 1..987: mol_type = other DNA

SEQ ID NO: 297 - protein, 330 aa, synthetic construct [sequence omitted]

SEQ ID NO: 298 - DNA, 1407 bp, synthetic construct
  misc_feature 1..1407: note = Description of Artificial Sequence: Synthetic polynucleotide
  source 1..1407: mol_type = other DNA
atgggctggtcctgcatcatcctgtttctggtggccaccgccaccggcgtgcacagcgaagtgcagctgctggaatctggcggcggactggtgcagcctggcggctctctgagactgtcttgtgccgcctccggctacaccttcaccacctactggatcacctgggtccgacaggctcccggcaagggactggaatgggtcggagacatctaccccggctcctccatctgcaactacaacgagaagttcaagtcccggttcaccatctccgtggacaactccaagtccaccgcctacctccagatgaactccctgagagccgaggacaccgccgtgtactactgcgccagagaggacggctacgacgcttggtttgcttactggggccagggcaccctggtcaccgtgtcatctgcatccaccaagggcccatcggtcttccccctggcaccctcctccaagagcacctctgggggcacagcggccctgggctgcctggtcaaggactacttccccgaaccggtgacggtgtcgtggaactcaggcgccctgaccagcggcgtgcacaccttcccggctgtcctacagtcctcaggactctactccctcagcagcgtggtgaccgtgccctccagcagcttgggcacccagacctacatctgcaacgtgaatcacaagcccagcaacaccaaggtggacaagaaagttgagcccaaatcttgtgacaaaactcacacatgcccaccgtgcccagcacctgaactcctggggggaccgtcagtcttcctcttccccccaaaacccaaggacaccctcatgatctcccggacccctgaggtcacatgcgtggtggtggacgtgagccacgaagaccctgaggtcaagttcaactggtacgtggacggcgtggaggtgcataatgccaagacaaagccgcgggaggagcagtacaacagcacgtaccgtgtggtcagcgtcctcaccgtcctgcaccaggactggctgaatggcaaggagtacaagtgcaaggtctccaacaaagccctcccagcccccatcgagaaaaccatctccaaagccaaagggcagccccgagaaccacaggtgtacaccctgcccccatcccgggatgagctgaccaagaaccaggtcagcctgacctgcctggtcaaaggcttctatcccagcgacatcgccgtggagtgggagagcaatgggcagccggagaacaactacaagaccacgcctcccgtgctggactccgacggctccttcttcttatattcaaagctcaccgtggacaagagcaggtggcagcaggggaacgtcttctcatgctccgtgatgcatgaggctctgcacaaccactacacgcagaagagcctctccctgtctcccgggaaatga

SEQ ID NO: 299 - DNA, 1350 bp, synthetic construct
  misc_feature 1..1350: note = Description of Artificial Sequence: Synthetic polynucleotide
  source 1..1350: mol_type = other DNA
gaagtgcagctgctggaatctggcggcggactggtgcagcctggcggctctctgagactgtcttgtgccgcctccggctacaccttcaccacctactggatcacctgggtccgacaggctcccggcaagggactggaatgggtcggagacatctaccccggctcctccatctgcaactacaacgagaagttcaagtcccggttcaccatctccgtggacaactccaagtccaccgcctacctccagatgaactccctgagagccgaggacaccgccgtgtactactgcgccagagaggacggctacgacgcttggtttgcttactggggccagggcaccctggtcaccgtgtcatctgcatccaccaagggcccatcggtcttccccctggcaccctcctccaagagcacctctgggggcacagcggccctgggctgcctggtcaaggactacttccccgaaccggtgacggtgtcgtggaactcaggcgccctgaccagcggcgtgcacaccttcccggctgtcctacagtcctcaggactctactccctcagcagcgtggtgaccgtgccctccagcagcttgggcacccagacctacatctgcaacgtgaatcacaagcccagcaacaccaaggtggacaagaaagttgagcccaaatcttgtgacaaaactcacacatgcccaccgtgcccagcacctgaactcctggggggaccgtcagtcttcctcttccccccaaaacccaaggacaccctcatgatctcccggacccctgaggtcacatgcgtggtggtggacgtgagccacgaagaccctgaggtcaagttcaactggtacgtggacggcgtggaggtgcataatgccaagacaaagccgcgggaggagcagtacaacagcacgtaccgtgtggtcagcgtcctcaccgtcctgcaccaggactggctgaatggcaaggagtacaagtgcaaggtctccaacaaagccctcccagcccccatcgagaaaaccatctccaaagccaaagggcagccccgagaaccacaggtgtacaccctgcccccatcccgggatgagctgaccaagaaccaggtcagcctgacctgcctggtcaaaggcttctatcccagcgacatcgccgtggagtgggagagcaatgggcagccggagaacaactacaagaccacgcctcccgtgctggactccgacggctccttcttcttatattcaaagctcaccgtggacaagagcaggtggcagcaggggaacgtcttctcatgctccgtgatgcatgaggctctgcacaaccactacacgcagaagagcctctccctgtctcccgggaaatga

SEQ ID NO: 300 - protein, 468 aa, synthetic construct
  REGION 1..468: note = Description of Artificial Sequence: Synthetic polypeptide
MGWSCIILFLVATATGVHSEVQLLESGGGLVQPGGSLRLSCAASGYTFTTYWITWVRQAPGKGLEWVGDIYPGSSICNYNEKFKSRFTISVDNSKSTAYLQMNSLRAEDTAVYYCAREDGYDAWFAYWGQGTLVTVSSASTKGPSVFPLAPSSKSTSGGTAALGCLVKDYFPEPVTVSWNSGALTSGVHTFPAVLQSSGLYSLSSVVTVPSSSLGTQTYICNVNHKPSNTKVDKKVEPKSCDKTHTCPPCPAPELLGGPSVFLFPPKPKDTLMISRTPEVTCVVVDVSHEDPEVKFNWYVDGVEVHNAKTKPREEQYNSTYRVVSVLTVLHQDWLNGKEYKCKVSNKALPAPIEKTISKAKGQPREPQVYTLPPSRDELTKNQVSLTCLVKGFYPSDIAVEWESNGQPENNYKTTPPVLDSDGSFFLYSKLTVDKSRWQQGNVFSCSVMHEALHNHYTQKSLSLSPGK

SEQ ID NO: 301 - protein, 449 aa, synthetic construct
  REGION 1..449: note = Description of Artificial Sequence: Synthetic polypeptide
EVQLLESGGGLVQPGGSLRLSCAASGYTFTTYWITWVRQAPGKGLEWVGDIYPGSSICNYNEKFKSRFTISVDNSKSTAYLQMNSLRAEDTAVYYCAREDGYDAWFAYWGQGTLVTVSSASTKGPSVFPLAPSSKSTSGGTAALGCLVKDYFPEPVTVSWNSGALTSGVHTFPAVLQSSGLYSLSSVVTVPSSSLGTQTYICNVNHKPSNTKVDKKVEPKSCDKTHTCPPCPAPELLGGPSVFLFPPKPKDTLMISRTPEVTCVVVDVSHEDPEVKFNWYVDGVEVHNAKTKPREEQYNSTYRVVSVLTVLHQDWLNGKEYKCKVSNKALPAPIEKTISKAKGQPREPQVYTLPPSRDELTKNQVSLTCLVKGFYPSDIAVEWESNGQPENNYKTTPPVLDSDGSFFLYSKLTVDKSRWQQGNVFSCSVMHEALHNHYTQKSLSLSPGK

SEQ ID NO: 302 - DNA, 57 bp, synthetic construct; identical to SEQ ID NO: 203
  misc_feature 1..57: note = Description of Artificial Sequence: Synthetic oligonucleotide
  source 1..57: mol_type = other DNA

SEQ ID NO: 303 - DNA, 357 bp, synthetic construct
  misc_feature 1..357: note = Description of Artificial Sequence: Synthetic polynucleotide
  source 1..357: mol_type = other DNA
gaagtgcagctgctggaatctggcggcggactggtgcagcctggcggctctctgagactgtcttgtgccgcctccggctacaccttcaccacctactggatcacctgggtccgacaggctcccggcaagggactggaatgggtcggagacatctaccccggctcctccatctgcaactacaacgagaagttcaagtcccggttcaccatctccgtggacaactccaagtccaccgcctacctccagatgaactccctgagagccgaggacaccgccgtgtactactgcgccagagaggacggctacgacgcttggtttgcttactggggccagggcaccctggtcaccgtgtcatct

SEQ ID NO: 304 - protein, 119 aa, synthetic construct
  REGION 1..119: note = Description of Artificial Sequence: Synthetic polypeptide
EVQLLESGGGLVQPGGSLRLSCAASGYTFTTYWITWVRQAPGKGLEWVGDIYPGSSICNYNEKFKSRFTISVDNSKSTAYLQMNSLRAEDTAVYYCAREDGYDAWFAYWGQGTLVTVSS

SEQ ID NO: 305 - DNA, 987 bp, synthetic construct; identical to SEQ ID NO: 206
  misc_feature 1..987: note = Description of Artificial Sequence: Synthetic polynucleotide
  source 1..987: mol_type = other DNA

SEQ ID NO: 306 - protein, 330 aa, synthetic construct [sequence omitted]

SEQ ID NO: 307 - DNA, 1407 bp, synthetic construct
  misc_feature 1..1407: note = Description of Artificial Sequence: Synthetic polynucleotide
  source 1..1407: mol_type = other DNA
atgggctggtcctgcatcatcctgtttctggtggccaccgccaccggcgtgcacagcgaagtgcagctgctggaatctggcggcggactggtgcagcctggcggctctctgagactgtcttgtgccgcctccggctacaccttcaccacctactggatcacctgggtccgacaggctcccggcaagggactggaatgggtcggagacatctaccccggctcctccatctgcaactacgccgactccgtcaagggccggttcaccatctccgtggacaactccaagtccaccgcctacctccagatgaactccctgagagccgaggacaccgccgtgtactactgcgccagagaggacggctacgacgcttggtttgcttactggggccagggcaccctggtcaccgtgtcatctgcatccaccaagggcccatcggtcttccccctggcaccctcctccaagagcacctctgggggcacagcggccctgggctgcctggtcaaggactacttccccgaaccggtgacggtgtcgtggaactcaggcgccctgaccagcggcgtgcacaccttcccggctgtcctacagtcctcaggactctactccctcagcagcgtggtgaccgtgccctccagcagcttgggcacccagacctacatctgcaacgtgaatcacaagcccagcaacaccaaggtggacaagaaagttgagcccaaatcttgtgacaaaactcacacatgcccaccgtgcccagcacctgaactcctggggggaccgtcagtcttcctcttccccccaaaacccaaggacaccctcatgatctcccggacccctgaggtcacatgcgtggtggtggacgtgagccacgaagaccctgaggtcaagttcaactggtacgtggacggcgtggaggtgcataatgccaagacaaagccgcgggaggagcagtacaacagcacgtaccgtgtggtcagcgtcctcaccgtcctgcaccaggactggctgaatggcaaggagtacaagtgcaaggtctccaacaaagccctcccagcccccatcgagaaaaccatctccaaagccaaagggcagccccgagaaccacaggtgtacaccctgcccccatcccgggatgagctgaccaagaaccaggtcagcctgacctgcctggtcaaaggcttctatcccagcgacatcgccgtggagtgggagagcaatgggcagccggagaacaactacaagaccacgcctcccgtgctggactccgacggctccttcttcttatattcaaagctcaccgtggacaagagcaggtggcagcaggggaacgtcttctcatgctccgtgatgcatgaggctctgcacaaccactacacgcagaagagcctctccctgtctcccgggaaatga

SEQ ID NO: 308 - DNA, 1350 bp, synthetic construct
  misc_feature 1..1350: note = Description of Artificial Sequence: Synthetic polynucleotide
  source 1..1350: mol_type = other DNA
gaagtgcagctgctggaatctggcggcggactggtgcagcctggcggctctctgagactgtcttgtgccgcctccggctacaccttcaccacctactggatcacctgggtccgacaggctcccggcaagggactggaatgggtcggagacatctaccccggctcctccatctgcaactacgccgactccgtcaagggccggttcaccatctccgtggacaactccaagtccaccgcctacctccagatgaactccctgagagccgaggacaccgccgtgtactactgcgccagagaggacggctacgacgcttggtttgcttactggggccagggcaccctggtcaccgtgtcatctgcatccaccaagggcccatcggtcttccccctggcaccctcctccaagagcacctctgggggcacagcggccctgggctgcctggtcaaggactacttccccgaaccggtgacggtgtcgtggaactcaggcgccctgaccagcggcgtgcacaccttcccggctgtcctacagtcctcaggactctactccctcagcagcgtggtgaccgtgccctccagcagcttgggcacccagacctacatctgcaacgtgaatcacaagcccagcaacaccaaggtggacaagaaagttgagcccaaatcttgtgacaaaactcacacatgcccaccgtgcccagcacctgaactcctggggggaccgtcagtcttcctcttccccccaaaacccaaggacaccctcatgatctcccggacccctgaggtcacatgcgtggtggtggacgtgagccacgaagaccctgaggtcaagttcaactggtacgtggacggcgtggaggtgcataatgccaagacaaagccgcgggaggagcagtacaacagcacgtaccgtgtggtcagcgtcctcaccgtcctgcaccaggactggctgaatggcaaggagtacaagtgcaaggtctccaacaaagccctcccagcccccatcgagaaaaccatctccaaagccaaagggcagccccgagaaccacaggtgtacaccctgcccccatcccgggatgagctgaccaagaaccaggtcagcctgacctgcctggtcaaaggcttctatcccagcgacatcgccgtggagtgggagagcaatgggcagccggagaacaactacaagaccacgcctcccgtgctggactccgacggctccttcttcttatattcaaagctcaccgtggacaagagcaggtggcagcaggggaacgtcttctcatgctccgtgatgcatgaggctctgcacaaccactacacgcagaagagcctctccctgtctcccgggaaatga

SEQ ID NO: 309 - protein, 468 aa, synthetic construct
  REGION 1..468: note = Description of Artificial Sequence: Synthetic polypeptide
MGWSCIILFLVATATGVHSEVQLLESGGGLVQPGGSLRLSCAASGYTFTTYWITWVRQAPGKGLEWVGDIYPGSSICNYADSVKGRFTISVDNSKSTAYLQMNSLRAEDTAVYYCAREDGYDAWFAYWGQGTLVTVSSASTKGPSVFPLAPSSKSTSGGTAALGCLVKDYFPEPVTVSWNSGALTSGVHTFPAVLQSSGLYSLSSVVTVPSSSLGTQTYICNVNHKPSNTKVDKKVEPKSCDKTHTCPPCPAPELLGGPSVFLFPPKPKDTLMISRTPEVTCVVVDVSHEDPEVKFNWYVDGVEVHNAKTKPREEQYNSTYRVVSVLTVLHQDWLNGKEYKCKVSNKALPAPIEKTISKAKGQPREPQVYTLPPSRDELTKNQVSLTCLVKGFYPSDIAVEWESNGQPENNYKTTPPVLDSDGSFFLYSKLTVDKSRWQQGNVFSCSVMHEALHNHYTQKSLSLSPGK

SEQ ID NO: 310 - protein, 449 aa, synthetic construct
  REGION 1..449: note = Description of Artificial Sequence: Synthetic polypeptide
EVQLLESGGGLVQPGGSLRLSCAASGYTFTTYWITWVRQAPGKGLEWVGDIYPGSSICNYADSVKGRFTISVDNSKSTAYLQMNSLRAEDTAVYYCAREDGYDAWFAYWGQGTLVTVSSASTKGPSVFPLAPSSKSTSGGTAALGCLVKDYFPEPVTVSWNSGALTSGVHTFPAVLQSSGLYSLSSVVTVPSSSLGTQTYICNVNHKPSNTKVDKKVEPKSCDKTHTCPPCPAPELLGGPSVFLFPPKPKDTLMISRTPEVTCVVVDVSHEDPEVKFNWYVDGVEVHNAKTKPREEQYNSTYRVVSVLTVLHQDWLNGKEYKCKVSNKALPAPIEKTISKAKGQPREPQVYTLPPSRDELTKNQVSLTCLVKGFYPSDIAVEWESNGQPENNYKTTPPVLDSDGSFFLYSKLTVDKSRWQQGNVFSCSVMHEALHNHYTQKSLSLSPGK

SEQ ID NO: 311 - DNA, 57 bp, synthetic construct; identical to SEQ ID NO: 203
  misc_feature 1..57: note = Description of Artificial Sequence: Synthetic oligonucleotide
  source 1..57: mol_type = other DNA

SEQ ID NO: 312 - DNA, 357 bp, synthetic construct
  misc_feature 1..357: note = Description of Artificial Sequence: Synthetic polynucleotide
  source 1..357: mol_type = other DNA
gaagtgcagctgctggaatctggcggcggactggtgcagcctggcggctctctgagactgtcttgtgccgcctccggctacaccttcaccacctactggatcacctgggtccgacaggctcccggcaagggactggaatgggtcggagacatctaccccggctcctccatctgcaactacgccgactccgtcaagggccggttcaccatctccgtggacaactccaagtccaccgcctacctccagatgaactccctgagagccgaggacaccgccgtgtactactgcgccagagaggacggctacgacgcttggtttgcttactggggccagggcaccctggtcaccgtgtcatct

SEQ ID NO: 313 - protein, 119 aa, synthetic construct
  REGION 1..119: note = Description of Artificial Sequence: Synthetic polypeptide
EVQLLESGGGLVQPGGSLRLSCAASGYTFTTYWITWVRQAPGKGLEWVGDIYPGSSICNYADSVKGRFTISVDNSKSTAYLQMNSLRAEDTAVYYCAREDGYDAWFAYWGQGTLVTVSS

SEQ ID NO: 314 - DNA, 987 bp, synthetic construct; identical to SEQ ID NO: 206
  misc_feature 1..987: note = Description of Artificial Sequence: Synthetic polynucleotide
  source 1..987: mol_type = other DNA

SEQ ID NO: 315 - protein, 330 aa, synthetic construct [sequence omitted]

SEQ ID NO: 316 - DNA, 1407 bp, synthetic construct
  misc_feature 1..1407: note = Description of Artificial Sequence: Synthetic polynucleotide
  source 1..1407: mol_type = other DNA
atgggctggtcctgcatcatcctgtttctggtggccaccgccaccggcgtgcacagcgaagtgcagctgctggaatctggcggcggactggtgcagcctggcggctctctgagactgtcttgtgccgcctccggctacaccttcaccacctactggatcacctgggtccgacaggctcccggcaagggactggaatgggtcggagacatctaccccggctcctccatctgcaactacgccgacaagttcaagggccggttcaccatctccgtggacaactccaagtccaccgcctacctccagatgaactccctgagagccgaggacaccgccgtgtactactgcgccagagaggacggctacgacgcttggtttgcttactggggccagggcaccctggtcaccgtgtcatctgcatccaccaagggcccatcggtcttccccctggcaccctcctccaagagcacctctgggggcacagcggccctgggctgcctggtcaaggactacttccccgaaccggtgacggtgtcgtggaactcaggcgccctgaccagcggcgtgcacaccttcccggctgtcctacagtcctcaggactctactccctcagcagcgtggtgaccgtgccctccagcagcttgggcacccagacctacatctgcaacgtgaatcacaagcccagcaacaccaaggtggacaagaaagttgagcccaaatcttgtgacaaaactcacacatgcccaccgtgcccagcacctgaactcctggggggaccgtcagtcttcctcttccccccaaaacccaaggacaccctcatgatctcccggacccctgaggtcacatgcgtggtggtggacgtgagccacgaagaccctgaggtcaagttcaactggtacgtggacggcgtggaggtgcataatgccaagacaaagccgcgggaggagcagtacaacagcacgtaccgtgtggtcagcgtcctcaccgtcctgcaccaggactggctgaatggcaaggagtacaagtgcaaggtctccaacaaagccctcccagcccccatcgagaaaaccatctccaaagccaaagggcagccccgagaaccacaggtgtacaccctgcccccatcccgggatgagctgaccaagaaccaggtcagcctgacctgcctggtcaaaggcttctatcccagcgacatcgccgtggagtgggagagcaatgggcagccggagaacaactacaagaccacgcctcccgtgctggactccgacggctccttcttcttatattcaaagctcaccgtggacaagagcaggtggcagcaggggaacgtcttctcatgctccgtgatgcatgaggctctgcacaaccactacacgcagaagagcctctccctgtctcccgggaaatga

SEQ ID NO: 317 - protein, 468 aa, synthetic construct
  REGION 1..468: note = Description of Artificial Sequence: Synthetic polypeptide
MGWSCIILFLVATATGVHSEVQLLESGGGLVQPGGSLRLSCAASGYTFTTYWITWVRQAPGKGLEWVGDIYPGSSICNYADKFKGRFTISVDNSKSTAYLQMNSLRAEDTAVYYCAREDGYDAWFAYWGQGTLVTVSSASTKGPSVFPLAPSSKSTSGGTAALGCLVKDYFPEPVTVSWNSGALTSGVHTFPAVLQSSGLYSLSSVVTVPSSSLGTQTYICNVNHKPSNTKVDKKVEPKSCDKTHTCPPCPAPELLGGPSVFLFPPKPKDTLMISRTPEVTCVVVDVSHEDPEVKFNWYVDGVEVHNAKTKPREEQYNSTYRVVSVLTVLHQDWLNGKEYKCKVSNKALPAPIEKTISKAKGQPREPQVYTLPPSRDELTKNQVSLTCLVKGFYPSDIAVEWESNGQPENNYKTTPPVLDSDGSFFLYSKLTVDKSRWQQGNVFSCSVMHEALHNHYTQKSLSLSPGK

SEQ ID NO: 318 - protein, 449 aa, synthetic construct
  REGION 1..449: note = Description of Artificial Sequence: Synthetic polypeptide
EVQLLESGGGLVQPGGSLRLSCAASGYTFTTYWITWVRQAPGKGLEWVGDIYPGSSICNYADKFKGRFTISVDNSKSTAYLQMNSLRAEDTAVYYCAREDGYDAWFAYWGQGTLVTVSSASTKGPSVFPLAPSSKSTSGGTAALGCLVKDYFPEPVTVSWNSGALTSGVHTFPAVLQSSGLYSLSSVVTVPSSSLGTQTYICNVNHKPSNTKVDKKVEPKSCDKTHTCPPCPAPELLGGPSVFLFPPKPKDTLMISRTPEVTCVVVDVSHEDPEVKFNWYVDGVEVHNAKTKPREEQYNSTYRVVSVLTVLHQDWLNGKEYKCKVSNKALPAPIEKTISKAKGQPREPQVYTLPPSRDELTKNQVSLTCLVKGFYPSDIAVEWESNGQPENNYKTTPPVLDSDGSFFLYSKLTVDKSRWQQGNVFSCSVMHEALHNHYTQKSLSLSPGK

SEQ ID NO: 319 - DNA, 57 bp, synthetic construct; identical to SEQ ID NO: 203
  misc_feature 1..57: note = Description of Artificial Sequence: Synthetic oligonucleotide
  source 1..57: mol_type = other DNA

SEQ ID NO: 320 - DNA, 357 bp, synthetic construct
  misc_feature 1..357: note = Description of Artificial Sequence: Synthetic polynucleotide
  source 1..357: mol_type = other DNA
gaagtgcagctgctggaatctggcggcggactggtgcagcctggcggctctctgagactgtcttgtgccgcctccggctacaccttcaccacctactggatcacctgggtccgacaggctcccggcaagggactggaatgggtcggagacatctaccccggctcctccatctgcaactacgccgacaagttcaagggccggttcaccatctccgtggacaactccaagtccaccgcctacctccagatgaactccctgagagccgaggacaccgccgtgtactactgcgccagagaggacggctacgacgcttggtttgcttactggggccagggcaccctggtcaccgtgtcatct

SEQ ID NO: 321 - protein, 119 aa, synthetic construct
  REGION 1..119: note = Description of Artificial Sequence: Synthetic polypeptide
EVQLLESGGGLVQPGGSLRLSCAASGYTFTTYWITWVRQAPGKGLEWVGDIYPGSSICNYADKFKGRFTISVDNSKSTAYLQMNSLRAEDTAVYYCAREDGYDAWFAYWGQGTLVTVSS

SEQ ID NO: 322 - DNA, 987 bp, synthetic construct; identical to SEQ ID NO: 206
  misc_feature 1..987: note = Description of Artificial Sequence: Synthetic polynucleotide
  source 1..987: mol_type = other DNA

SEQ ID NO: 323 - protein, 330 aa, synthetic construct [sequence omitted]

SEQ ID NO: 324 - DNA, 1407 bp, synthetic construct
  misc_feature 1..1407: note = Description of Artificial Sequence: Synthetic polynucleotide
  source 1..1407: mol_type = other DNA
atgggctggtcctgcatcatcctgtttctggtggccaccgccaccggcgtgcacagcgaagtgcagctgctggaatctggcggcggactggtgcagcctggcggctctctgagactgtcttgtgccgcctccggctacaccttcaccacctactggatcacctgggtccgacaggctcccggcaagggactggaatgggtcggagacatctaccccggctcctccatctgcaactacaacgagaagttcaagtcccggttcaccatctccgtggacaactccaagaacaccgcctacctccagatgaactccctgagagccgaggacaccgccgtgtactactgcgccagagaggacggctacgacgcttggtttgcttactggggccagggcaccctggtcaccgtgtcatctgcatccaccaagggcccatcggtcttccccctggcaccctcctccaagagcacctctgggggcacagcggccctgggctgcctggtcaaggactacttccccgaaccggtgacggtgtcgtggaactcaggcgccctgaccagcggcgtgcacaccttcccggctgtcctacagtcctcaggactctactccctcagcagcgtggtgaccgtgccctccagcagcttgggcacccagacctacatctgcaacgtgaatcacaagcccagcaacaccaaggtggacaagaaagttgagcccaaatcttgtgacaaaactcacacatgcccaccgtgcccagcacctgaactcctggggggaccgtcagtcttcctcttccccccaaaacccaaggacaccctcatgatctcccggacccctgaggtcacatgcgtggtggtggacgtgagccacgaagaccctgaggtcaagttcaactggtacgtggacggcgtggaggtgcataatgccaagacaaagccgcgggaggagcagtacaacagcacgtaccgtgtggtcagcgtcctcaccgtcctgcaccaggactggctgaatggcaaggagtacaagtgcaaggtctccaacaaagccctcccagcccccatcgagaaaaccatctccaaagccaaagggcagccccgagaaccacaggtgtacaccctgcccccatcccgggatgagctgaccaagaaccaggtcagcctgacctgcctggtcaaaggcttctatcccagcgacatcgccgtggagtgggagagcaatgggcagccggagaacaactacaagaccacgcctcccgtgctggactccgacggctccttcttcttatattcaaagctcaccgtggacaagagcaggtggcagcaggggaacgtcttctcatgctccgtgatgcatgaggctctgcacaaccactacacgcagaagagcctctccctgtctcccgggaaatga

SEQ ID NO: 325 - DNA, 1350 bp, synthetic construct
  misc_feature 1..1350: note = Description of Artificial Sequence: Synthetic polynucleotide
  source 1..1350: mol_type = other DNA
gaagtgcagctgctggaatctggcggcggactggtgcagcctggcggctctctgagactgtcttgtgccgcctccggctacaccttcaccacctactggatcacctgggtccgacaggctcccggcaagggactggaatgggtcggagacatctaccccggctcctccatctgcaactacaacgagaagttcaagtcccggttcaccatctccgtggacaactccaagaacaccgcctacctccagatgaactccctgagagccgaggacaccgccgtgtactactgcgccagagaggacggctacgacgcttggtttgcttactggggccagggcaccctggtcaccgtgtcatctgcatccaccaagggcccatcggtcttccccctggcaccctcctccaagagcacctctgggggcacagcggccctgggctgcctggtcaaggactacttccccgaaccggtgacggtgtcgtggaactcaggcgccctgaccagcggcgtgcacaccttcccggctgtcctacagtcctcaggactctactccctcagcagcgtggtgaccgtgccctccagcagcttgggcacccagacctacatctgcaacgtgaatcacaagcccagcaacaccaaggtggacaagaaagttgagcccaaatcttgtgacaaaactcacacatgcccaccgtgcccagcacctgaactcctggggggaccgtcagtcttcctcttccccccaaaacccaaggacaccctcatgatctcccggacccctgaggtcacatgcgtggtggtggacgtgagccacgaagaccctgaggtcaagttcaactggtacgtggacggcgtggaggtgcataatgccaagacaaagccgcgggaggagcagtacaacagcacgtaccgtgtggtcagcgtcctcaccgtcctgcaccaggactggctgaatggcaaggagtacaagtgcaaggtctccaacaaagccctcccagcccccatcgagaaaaccatctccaaagccaaagggcagccccgagaaccacaggtgtacaccctgcccccatcccgggatgagctgaccaagaaccaggtcagcctgacctgcctggtcaaaggcttctatcccagcgacatcgccgtggagtgggagagcaatgggcagccggagaacaactacaagaccacgcctcccgtgctggactccgacggctccttcttcttatattcaaagctcaccgtggacaagagcaggtggcagcaggggaacgtcttctcatgctccgtgatgcatgaggctctgcacaaccactacacgcagaagagcctctccctgtctcccgggaaatga

SEQ ID NO: 326 - protein, 468 aa, synthetic construct
  REGION 1..468: note = Description of Artificial Sequence: Synthetic polypeptide
MGWSCIILFLVATATGVHSEVQLLESGGGLVQPGGSLRLSCAASGYTFTTYWITWVRQAPGKGLEWVGDIYPGSSICNYNEKFKSRFTISVDNSKNTAYLQMNSLRAEDTAVYYCAREDGYDAWFAYWGQGTLVTVSSASTKGPSVFPLAPSSKSTSGGTAALGCLVKDYFPEPVTVSWNSGALTSGVHTFPAVLQSSGLYSLSSVVTVPSSSLGTQTYICNVNHKPSNTKVDKKVEPKSCDKTHTCPPCPAPELLGGPSVFLFPPKPKDTLMISRTPEVTCVVVDVSHEDPEVKFNWYVDGVEVHNAKTKPREEQYNSTYRVVSVLTVLHQDWLNGKEYKCKVSNKALPAPIEKTISKAKGQPREPQVYTLPPSRDELTKNQVSLTCLVKGFYPSDIAVEWESNGQPENNYKTTPPVLDSDGSFFLYSKLTVDKSRWQQGNVFSCSVMHEALHNHYTQKSLSLSPGK

SEQ ID NO: 327 - protein, 449 aa, synthetic construct
  REGION 1..449: note = Description of Artificial Sequence: Synthetic polypeptide
EVQLLESGGGLVQPGGSLRLSCAASGYTFTTYWITWVRQAPGKGLEWVGDIYPGSSICNYNEKFKSRFTISVDNSKNTAYLQMNSLRAEDTAVYYCAREDGYDAWFAYWGQGTLVTVSSASTKGPSVFPLAPSSKSTSGGTAALGCLVKDYFPEPVTVSWNSGALTSGVHTFPAVLQSSGLYSLSSVVTVPSSSLGTQTYICNVNHKPSNTKVDKKVEPKSCDKTHTCPPCPAPELLGGPSVFLFPPKPKDTLMISRTPEVTCVVVDVSHEDPEVKFNWYVDGVEVHNAKTKPREEQYNSTYRVVSVLTVLHQDWLNGKEYKCKVSNKALPAPIEKTISKAKGQPREPQVYTLPPSRDELTKNQVSLTCLVKGFYPSDIAVEWESNGQPENNYKTTPPVLDSDGSFFLYSKLTVDKSRWQQGNVFSCSVMHEALHNHYTQKSLSLSPGK

SEQ ID NO: 328 - DNA, 57 bp, synthetic construct; identical to SEQ ID NO: 203
  misc_feature 1..57: note = Description of Artificial Sequence: Synthetic oligonucleotide
  source 1..57: mol_type = other DNA

SEQ ID NO: 329 - DNA, 357 bp, synthetic construct
  misc_feature 1..357: note = Description of Artificial Sequence: Synthetic polynucleotide
  source 1..357: mol_type = other DNA
gaagtgcagctgctggaatctggcggcggactggtgcagcctggcggctctctgagactgtcttgtgccgcctccggctacaccttcaccacctactggatcacctgggtccgacaggctcccggcaagggactggaatgggtcggagacatctaccccggctcctccatctgcaactacaacgagaagttcaagtcccggttcaccatctccgtggacaactccaagaacaccgcctacctccagatgaactccctgagagccgaggacaccgccgtgtactactgcgccagagaggacggctacgacgcttggtttgcttactggggccagggcaccctggtcaccgtgtcatct

SEQ ID NO: 330 - protein, 119 aa, synthetic construct
  REGION 1..119: note = Description of Artificial Sequence: Synthetic polypeptide
EVQLLESGGGLVQPGGSLRLSCAASGYTFTTYWITWVRQAPGKGLEWVGDIYPGSSICNYNEKFKSRFTISVDNSKNTAYLQMNSLRAEDTAVYYCAREDGYDAWFAYWGQGTLVTVSS

SEQ ID NO: 331 - DNA, 1401 bp, synthetic construct
  misc_feature 1..1401: note = Description of Artificial Sequence: Synthetic polynucleotide
  source 1..1401: mol_type = other DNA
atgggctggtcctgcatcatcctgtttctggtggccaccgccaccggcgtgcacagcgaagtgcagctgctggaatctggcggcggactggtgcagcctggcggctctctgagactgtcttgtgccgcctccggctacaccttcaccacctactggatcacctgggtccgacaggctcccggcaagggactggaatgggtcggagacatctaccccggctcctccatctgcaactacaacgagaagttcaagtcccggttcaccatctccgtggacaactccaagaacaccgcctacctccagatgaactccctgagagccgaggacaccgccgtgtactactgcgccagagaggacggctacgacgcttggtttgcttactggggccagggcaccctggtcaccgtgtcatctgcatccaccaagggcccatcggtcttccccctggcaccctcctccaagagcacctctgggggcacagcggccctgggctgcctggtcaaggactacttccccgaaccggtgacggtgtcgtggaactcaggcgccctgaccagcggcgtgcacaccttcccggctgtcctacagtcctcaggactctactccctcagcagcgtggtgaccgtgccctccagcagcttgggcacccagacctacatctgcaacgtgaatcacaagcccagcaacaccaaggtggacaagaaagttgagcccaaatcttgtgacaaaactcacacatgcccaccgtgcccagcacctgaactcctggggggaccgtcagtcttcctcttccccccaaaacccaaggacaccctcatgatctcccggacccctgaggtcacatgcgtggtggtggacgtgagccacgaagaccctgaggtcaagttcaactggtacgtggacggcgtggaggtgcataatgccaagacaaagccgcgggaggagcagtacaacagcacgtaccgtgtggtcagcgtcctcaccgtcctgcaccaggactggctgaatggcaaggagtacaagtgcaaggtctccaacaaagccctcccagcccccatcgagaaaaccatctccaaagccaaagggcagccccgagaaccacaggtgtacaccctgcccccatcccgggatgagctgaccaagaaccaggtcagcctgacctgcctggtcaaaggcttctatcccagcgacatcgccgtggagtgggagagcaatgggcagccggagaacaactacaagaccacgcctcccgtgctggactccgacggctccttcttcttatattcaaagctcaccgtggacaagagcaggtggcagcaggggaacgtcttctcatgctccgtgatgcatgaggctctgcacaaccactacacgcagaagagcctctccctgtctcccggg

SEQ ID NO: 332 - protein, 330 aa, synthetic construct [sequence omitted]

SEQ ID NO: 333 - DNA, 1407 bp, synthetic construct
  misc_feature 1..1407: note = Description of Artificial Sequence: Synthetic polynucleotide
  source 1..1407: mol_type = other DNA
atgggctggtcctgcatcatcctgtttctggtggccaccgccaccggcgtgcacagcgaagtgcagctgctggaatctggcggcggactggtgcagcctggcggctctctgagactgtcttgtgccgcctccggctacaccttcaccacctactggatcacctgggtccgacaggctcccggcaagggactggaatgggtctccgacatctaccccggctcctccatctgcaactacaacgagaagttcaagtcccggttcaccatctccgtggacaactccaagaacaccgcctacctccagatgaactccctgagagccgaggacaccgccgtgtactactgcgccagagaggacggctacgacgcttggtttgcttactggggccagggcaccctggtcaccgtgtcatctgcatccaccaagggcccatcggtcttccccctggcaccctcctccaagagcacctctgggggcacagcggccctgggctgcctggtcaaggactacttccccgaaccggtgacggtgtcgtggaactcaggcgccctgaccagcggcgtgcacaccttcccggctgtcctacagtcctcaggactctactccctcagcagcgtggtgaccgtgccctccagcagcttgggcacccagacctacatctgcaacgtgaatcacaagcccagcaacaccaaggtggacaagaaagttgagcccaaatcttgtgacaaaactcacacatgcccaccgtgcccagcacctgaactcctggggggaccgtcagtcttcctcttccccccaaaacccaaggacaccctcatgatctcccggacccctgaggtcacatgcgtggtggtggacgtgagccacgaagaccctgaggtcaagttcaactggtacgtggacggcgtggaggtgcataatgccaagacaaagccgcgggaggagcagtacaacagcacgtaccgtgtggtcagcgtcctcaccgtcctgcaccaggactggctgaatggcaaggagtacaagtgcaaggtctccaacaaagccctcccagcccccatcgagaaaaccatctccaaagccaaagggcagccccgagaaccacaggtgtacaccctgcccccatcccgggatgagctgaccaagaaccaggtcagcctgacctgcctggtcaaaggcttctatcccagcgacatcgccgtggagtgggagagcaatgggcagccggagaacaactacaagaccacgcctcccgtgctggactccgacggctccttcttcttatattcaaagctcaccgtggacaagagcaggtggcagcaggggaacgtcttctcatgctccgtgatgcatgaggctctgcacaaccactacacgcagaagagcctctccctgtctcccgggaaatga

SEQ ID NO: 334 - DNA, 1350 bp, synthetic construct
  misc_feature 1..1350: note = Description of Artificial Sequence: Synthetic polynucleotide
  source 1..1350: mol_type = other DNA
gaagtgcagctgctggaatctggcggcggactggtgcagcctggcggctctctgagactgtcttgtgccgcctccggctacaccttcaccacctactggatcacctgggtccgacaggctcccggcaagggactggaatgggtctccgacatctaccccggctcctccatctgcaactacaacgagaagttcaagtcccggttcaccatctccgtggacaactccaagaacaccgcctacctccagatgaactccctgagagccgaggacaccgccgtgtactactgcgccagagaggacggctacgacgcttggtttgcttactggggccagggcaccctggtcaccgtgtcatctgcatccaccaagggcccatcggtcttccccctggcaccctcctccaagagcacctctgggggcacagcggccctgggctgcctggtcaaggactacttccccgaaccggtgacggtgtcgtggaactcaggcgccctgaccagcggcgtgcacaccttcccggctgtcctacagtcctcaggactctactccctcagcagcgtggtgaccgtgccctccagcagcttgggcacccagacctacatctgcaacgtgaatcacaagcccagcaacaccaaggtggacaagaaagttgagcccaaatcttgtgacaaaactcacacatgcccaccgtgcccagcacctgaactcctggggggaccgtcagtcttcctcttccccccaaaacccaaggacaccctcatgatctcccggacccctgaggtcacatgcgtggtggtggacgtgagccacgaagaccctgaggtcaagttcaactggtacgtggacggcgtggaggtgcataatgccaagacaaagccgcgggaggagcagtacaacagcacgtaccgtgtggtcagcgtcctcaccgtcctgcaccaggactggctgaatggcaaggagtacaagtgcaaggtctccaacaaagccctcccagcccccatcgagaaaaccatctccaaagccaaagggcagccccgagaaccacaggtgtacaccctgcccccatcccgggatgagctgaccaagaaccaggtcagcctgacctgcctggtcaaaggcttctatcccagcgacatcgccgtggagtgggagagcaatgggcagccggagaacaactacaagaccacgcctcccgtgctggactccgacggctccttcttcttatattcaaagctcaccgtggacaagagcaggtggcagcaggggaacgtcttctcatgctccgtgatgcatgaggctctgcacaaccactacacgcagaagagcctctccctgtctcccgggaaatga

SEQ ID NO: 335 - protein, 468 aa, synthetic construct
  REGION 1..468: note = Description of Artificial Sequence: Synthetic polypeptide
MGWSCIILFLVATATGVHSEVQLLESGGGLVQPGGSLRLSCAASGYTFTTYWITWVRQAPGKGLEWVSDIYPGSSICNYNEKFKSRFTISVDNSKNTAYLQMNSLRAEDTAVYYCAREDGYDAWFAYWGQGTLVTVSSASTKGPSVFPLAPSSKSTSGGTAALGCLVKDYFPEPVTVSWNSGALTSGVHTFPAVLQSSGLYSLSSVVTVPSSSLGTQTYICNVNHKPSNTKVDKKVEPKSCDKTHTCPPCPAPELLGGPSVFLFPPKPKDTLMISRTPEVTCVVVDVSHEDPEVKFNWYVDGVEVHNAKTKPREEQYNSTYRVVSVLTVLHQDWLNGKEYKCKVSNKALPAPIEKTISKAKGQPREPQVYTLPPSRDELTKNQVSLTCLVKGFYPSDIAVEWESNGQPENNYKTTPPVLDSDGSFFLYSKLTVDKSRWQQGNVFSCSVMHEALHNHYTQKSLSLSPGK

SEQ ID NO: 336 - protein, 449 aa, synthetic construct
  REGION 1..449: note = Description of Artificial Sequence: Synthetic polypeptide
EVQLLESGGGLVQPGGSLRLSCAASGYTFTTYWITWVRQAPGKGLEWVSDIYPGSSICNYNEKFKSRFTISVDNSKNTAYLQMNSLRAEDTAVYYCAREDGYDAWFAYWGQGTLVTVSSASTKGPSVFPLAPSSKSTSGGTAALGCLVKDYFPEPVTVSWNSGALTSGVHTFPAVLQSSGLYSLSSVVTVPSSSLGTQTYICNVNHKPSNTKVDKKVEPKSCDKTHTCPPCPAPELLGGPSVFLFPPKPKDTLMISRTPEVTCVVVDVSHEDPEVKFNWYVDGVEVHNAKTKPREEQYNSTYRVVSVLTVLHQDWLNGKEYKCKVSNKALPAPIEKTISKAKGQPREPQVYTLPPSRDELTKNQVSLTCLVKGFYPSDIAVEWESNGQPENNYKTTPPVLDSDGSFFLYSKLTVDKSRWQQGNVFSCSVMHEALHNHYTQKSLSLSPGK

SEQ ID NO: 337 - DNA, 57 bp, synthetic construct; identical to SEQ ID NO: 203
  misc_feature 1..57: note = Description of Artificial Sequence: Synthetic oligonucleotide
  source 1..57: mol_type = other DNA

SEQ ID NO: 338 - DNA, 357 bp, synthetic construct
  misc_feature 1..357: note = Description of Artificial Sequence: Synthetic polynucleotide
  source 1..357: mol_type = other DNA
gaagtgcagctgctggaatctggcggcggactggtgcagcctggcggctctctgagactgtcttgtgccgcctccggctacaccttcaccacctactggatcacctgggtccgacaggctcccggcaagggactggaatgggtctccgacatctaccccggctcctccatctgcaactacaacgagaagttcaagtcccggttcaccatctccgtggacaactccaagaacaccgcctacctccagatgaactccctgagagccgaggacaccgccgtgtactactgcgccagagaggacggctacgacgcttggtttgcttactggggccagggcaccctggtcaccgtgtcatct

SEQ ID NO: 339 - protein, 119 aa, synthetic construct
  REGION 1..119: note = Description of Artificial Sequence: Synthetic polypeptide
EVQLLESGGGLVQPGGSLRLSCAASGYTFTTYWITWVRQAPGKGLEWVSDIYPGSSICNYNEKFKSRFTISVDNSKNTAYLQMNSLRAEDTAVYYCAREDGYDAWFAYWGQGTLVTVSS

SEQ ID NO: 340 - DNA, 993 bp, synthetic construct
  misc_feature 1..993: note = Description of Artificial Sequence: Synthetic polynucleotide
  source 1..993: mol_type = other DNA
gcatccaccaagggcccatcggtcttccccctggcaccctcctccaagagcacctctgggggcacagcggccctgggctgcctggtcaaggactacttccccgaaccggtgacggtgtcgtggaactcaggcgccctgaccagcggcgtgcacaccttcccggctgtcctacagtcctcaggactctactccctcagcagcgtggtgaccgtgccctccagcagcttgggcacccagacctacatctgcaacgtgaatcacaagcccagcaacaccaaggtggacaagaaagttgagcccaaatcttgtgacaaaactcacacatgcccaccgtgcccagcacctgaactcctggggggaccgtcagtcttcctcttccccccaaaacccaaggacaccctcatgatctcccggacccctgaggtcacatgcgtggtggtggacgtgagccacgaagaccctgaggtcaagttcaactggtacgtggacggcgtggaggtgcataatgccaagacaaagccgcgggaggagcagtacaacagcacgtaccgtgtggtcagcgtcctcaccgtcctgcaccaggactggctgaatggcaaggagtacaagtgcaaggtctccaacaaagccctcccagcccccatcgagaaaaccatctccaaagccaaagggcagccccgagaaccacaggtgtacaccctgcccccatcccgggatgagctgaccaagaaccaggtcagcctgacctgcctggtcaaaggcttctatcccagcgacatcgccgtggagtgggagagcaatgggcagccggagaacaactacaagaccacgcctcccgtgctggactccgacggctccttcttcttatattcaaagctcaccgtggacaagagcaggtggcagcaggggaacgtcttctcatgctccgtgatgcatgaggctctgcacaaccactacacgcagaagagcctctccctgtctcccgggaaatga

SEQ ID NO: 341 - protein, 330 aa, synthetic construct [sequence omitted]

SEQ ID NO: 342 - DNA, 1407 bp, synthetic construct
  misc_feature 1..1407: note = Description of Artificial Sequence: Synthetic polynucleotide
  source 1..1407: mol_type = other DNA
atgggctggtcctgcatcatcctgtttctggtggccaccgccaccggcgtgcacagcgaagtgcagctgctggaatctggcggcggactggtgcagcctggcggctctctgagactgtcttgtgccgcctccggctacaccttcaccacctactggatcacctgggtccgacaggctcccggcaagggactggaatgggtctccgacatctaccccggctcctccatctgcaactacaacgagaagttcaagtcccggttcaccatctccgtggacaactccaagaacaccctgtacctccagatgaactccctgagagccgaggacaccgccgtgtactactgcgccagagaggacggctacgacgcttggtttgcttactggggccagggcaccctggtcaccgtgtcatctgcatccaccaagggcccatcggtcttccccctggcaccctcctccaagagcacctctgggggcacagcggccctgggctgcctggtcaaggactacttccccgaaccggtgacggtgtcgtggaactcaggcgccctgaccagcggcgtgcacaccttcccggctgtcctacagtcctcaggactctactccctcagcagcgtggtgaccgtgccctccagcagcttgggcacccagacctacatctgcaacgtgaatcacaagcccagcaacaccaaggtggacaagaaagttgagcccaaatcttgtgacaaaactcacacatgcccaccgtgcccagcacctgaactcctggggggaccgtcagtcttcctcttccccccaaaacccaaggacaccctcatgatctcccggacccctgaggtcacatgcgtggtggtggacgtgagccacgaagaccctgaggtcaagttcaactggtacgtggacggcgtggaggtgcataatgccaagacaaagccgcgggaggagcagtacaacagcacgtaccgtgtggtcagcgtcctcaccgtcctgcaccaggactggctgaatggcaaggagtacaagtgcaaggtctccaacaaagccctcccagcccccatcgagaaaaccatctccaaagccaaagggcagccccgagaaccacaggtgtacaccctgcccccatcccgggatgagctgaccaagaaccaggtcagcctgacctgcctggtcaaaggcttctatcccagcgacatcgccgtggagtgggagagcaatgggcagccggagaacaactacaagaccacgcctcccgtgctggactccgacggctccttcttcttatattcaaagctcaccgtggacaagagcaggtggcagcaggggaacgtcttctcatgctccgtgatgcatgaggctctgcacaaccactacacgcagaagagcctctccctgtctcccgggaaatga

SEQ ID NO: 343 - DNA, 1350 bp, synthetic construct
  misc_feature 1..1350: note = Description of Artificial Sequence: Synthetic polynucleotide
  source 1..1350: mol_type = other DNA
gaagtgcagctgctggaatctggcggcggactggtgcagcctggcggctctctgagactgtcttgtgccgcctccggctacaccttcaccacctactggatcacctgggtccgacaggctcccggcaagggactggaatgggtctccgacatctaccccggctcctccatctgcaactacaacgagaagttcaagtcccggttcaccatctccgtggacaactccaagaacaccctgtacctccagatgaactccctgagagccgaggacaccgccgtgtactactgcgccagagaggacggctacgacgcttggtttgcttactggggccagggcaccctggtcaccgtgtcatctgcatccaccaagggcccatcggtcttccccctggcaccctcctccaagagcacctctgggggcacagcggccctgggctgcctggtcaaggactacttccccgaaccggtgacggtgtcgtggaactcaggcgccctgaccagcggcgtgcacaccttcccggctgtcctacagtcctcaggactctactccctcagcagcgtggtgaccgtgccctccagcagcttgggcacccagacctacatctgcaacgtgaatcacaagcccagcaacaccaaggtggacaagaaagttgagcccaaatcttgtgacaaaactcacacatgcccaccgtgcccagcacctgaactcctggggggaccgtcagtcttcctcttccccccaaaacccaaggacaccctcatgatctcccggacccctgaggtcacatgcgtggtggtggacgtgagccacgaagaccctgaggtcaagttcaactggtacgtggacggcgtggaggtgcataatgccaagacaaagccgcgggaggagcagtacaacagcacgtaccgtgtggtcagcgtcctcaccgtcctgcaccaggactggctgaatggcaaggagtacaagtgcaaggtctccaacaaagccctcccagcccccatcgagaaaaccatctccaaagccaaagggcagccccgagaaccacaggtgtacaccctgcccccatcccgggatgagctgaccaagaaccaggtcagcctgacctgcctggtcaaaggcttctatcccagcgacatcgccgtggagtgggagagcaatgggcagccggagaacaactacaagaccacgcctcccgtgctggactccgacggctccttcttcttatattcaaagctcaccgtggacaagagcaggtggcagcaggggaacgtcttctcatgctccgtgatgcatgaggctctgcacaaccactacacgcagaagagcctctccctgtctcccgggaaatga

SEQ ID NO: 344 - protein, 468 aa, synthetic construct
  REGION 1..468: note = Description of Artificial Sequence: Synthetic polypeptide
MGWSCIILFLVATATGVHSEVQLLESGGGLVQPGGSLRLSCAASGYTFTTYWITWVRQAPGKGLEWVSDIYPGSSICNYNEKFKSRFTISVDNSKNTLYLQMNSLRAEDTAVYYCAREDGYDAWFAYWGQGTLVTVSSASTKGPSVFPLAPSSKSTSGGTAALGCLVKDYFPEPVTVSWNSGALTSGVHTFPAVLQSSGLYSLSSVVTVPSSSLGTQTYICNVNHKPSNTKVDKKVEPKSCDKTHTCPPCPAPELLGGPSVFLFPPKPKDTLMISRTPEVTCVVVDVSHEDPEVKFNWYVDGVEVHNAKTKPREEQYNSTYRVVSVLTVLHQDWLNGKEYKCKVSNKALPAPIEKTISKAKGQPREPQVYTLPPSRDELTKNQVSLTCLVKGFYPSDIAVEWESNGQPENNYKTTPPVLDSDGSFFLYSKLTVDKSRWQQGNVFSCSVMHEALHNHYTQKSLSLSPGK

SEQ ID NO: 345 - protein, 449 aa, synthetic construct
  REGION 1..449: note = Description of Artificial Sequence: Synthetic polypeptide
EVQLLESGGGLVQPGGSLRLSCAASGYTFTTYWITWVRQAPGKGLEWVSDIYPGSSICNYNEKFKSRFTISVDNSKNTLYLQMNSLRAEDTAVYYCAREDGYDAWFAYWGQGTLVTVSSASTKGPSVFPLAPSSKSTSGGTAALGCLVKDYFPEPVTVSWNSGALTSGVHTFPAVLQSSGLYSLSSVVTVPSSSLGTQTYICNVNHKPSNTKVDKKVEPKSCDKTHTCPPCPAPELLGGPSVFLFPPKPKDTLMISRTPEVTCVVVDVSHEDPEVKFNWYVDGVEVHNAKTKPREEQYNSTYRVVSVLTVLHQDWLNGKEYKCKVSNKALPAPIEKTISKAKGQPREPQVYTLPPSRDELTKNQVSLTCLVKGFYPSDIAVEWESNGQPENNYKTTPPVLDSDGSFFLYSKLTVDKSRWQQGNVFSCSVMHEALHNHYTQKSLSLSPGK

SEQ ID NO: 346 - DNA, 57 bp, synthetic construct; identical to SEQ ID NO: 203
  misc_feature 1..57: note = Description of Artificial Sequence: Synthetic oligonucleotide
  source 1..57: mol_type = other DNA

SEQ ID NO: 347 - DNA, 357 bp, synthetic construct
  misc_feature 1..357: note = Description of Artificial Sequence: Synthetic polynucleotide
  source 1..357: mol_type = other DNA
gaagtgcagctgctggaatctggcggcggactggtgcagcctggcggctctctgagactgtcttgtgccgcctccggctacaccttcaccacctactggatcacctgggtccgacaggctcccggcaagggactggaatgggtctccgacatctaccccggctcctccatctgcaactacaacgagaagttcaagtcccggttcaccatctccgtggacaactccaagaacaccctgtacctccagatgaactccctgagagccgaggacaccgccgtgtactactgcgccagagaggacggctacgacgcttggtttgcttactggggccagggcaccctggtcaccgtgtcatct

SEQ ID NO: 348 - protein, 119 aa, synthetic construct
  REGION 1..119: note = Description of Artificial Sequence: Synthetic polypeptide
EVQLLESGGGLVQPGGSLRLSCAASGYTFTTYWITWVRQAPGKGLEWVSDIYPGSSICNYNEKFKSRFTISVDNSKNTLYLQMNSLRAEDTAVYYCAREDGYDAWFAYWGQGTLVTVSS

SEQ ID NO: 349 - DNA, 987 bp, synthetic construct; identical to SEQ ID NO: 206
  misc_feature 1..987: note = Description of Artificial Sequence: Synthetic polynucleotide
  source 1..987: mol_type = other DNA

SEQ ID NO: 350 - protein, 330 aa, synthetic construct [sequence omitted]

SEQ ID NO: 351 - DNA, 1407 bp, synthetic construct
  misc_feature 1..1407: note = Description of Artificial Sequence: Synthetic polynucleotide
  source 1..1407: mol_type = other DNA
atgggctggtcctgcatcatcctgtttctggtggccaccgccaccggcgtgcacagcgaagtgcagctgctggaatctggcggcggactggtgcagcctggcggctctctgagactgtcttgtgccgcctccggctacaccttcaccacctactggatcacctgggtccgacaggctcccggcaagggactggaatgggtctccgacatctaccccggctcctccatctgcaactacaacgagaagttcaagtcccggttcaccatctcccgggacaactccaagaacaccctgtacctccagatgaactccctgagagccgaggacaccgccgtgtactactgcgccagagaggacggctacgacgcttggtttgcttactggggccagggcaccctggtcaccgtgtcatctgcatccaccaagggcccatcggtcttccccctggcaccctcctccaagagcacctctgggggcacagcggccctgggctgcctggtcaaggactacttccccgaaccggtgacggtgtcgtggaactcaggcgccctgaccagcggcgtgcacaccttcccggctgtcctacagtcctcaggactctactccctcagcagcgtggtgaccgtgccctccagcagcttgggcacccagacctacatctgcaacgtgaatcacaagcccagcaacaccaaggtggacaagaaagttgagcccaaatcttgtgacaaaactcacacatgcccaccgtgcccagcacctgaactcctggggggaccgtcagtcttcctcttccccccaaaacccaaggacaccctcatgatctcccggacccctgaggtcacatgcgtggtggtggacgtgagccacgaagaccctgaggtcaagttcaactggtacgtggacggcgtggaggtgcataatgccaagacaaagccgcgggaggagcagtacaacagcacgtaccgtgtggtcagcgtcctcaccgtcctgcaccaggactggctgaatggcaaggagtacaagtgcaaggtctccaacaaagccctcccagcccccatcgagaaaaccatctccaaagccaaagggcagccccgagaaccacaggtgtacaccctgcccccatcccgggatgagctgaccaagaaccaggtcagcctgacctgcctggtcaaaggcttctatcccagcgacatcgccgtggagtgggagagcaatgggcagccggagaacaactacaagaccacgcctcccgtgctggactccgacggctccttcttcttatattcaaagctcaccgtggacaagagcaggtggcagcaggggaacgtcttctcatgctccgtgatgcatgaggctctgcacaaccactacacgcagaagagcctctccctgtctcccgggaaatga

SEQ ID NO: 352 - DNA, 1350 bp, synthetic construct
  misc_feature 1..1350: note = Description of Artificial Sequence: Synthetic polynucleotide
  source 1..1350: mol_type = other DNA
gaagtgcagctgctggaatctggcggcggactggtgcagcctggcggctctctgagactgtcttgtgccgcctccggctacaccttcaccacctactggatcacctgggtccgacaggctcccggcaagggactggaatgggtctccgacatctaccccggctcctccatctgcaactacaacgagaagttcaagtcccggttcaccatctcccgggacaactccaagaacaccctgtacctccagatgaactccctgagagccgaggacaccgccgtgtactactgcgccagagaggacggctacgacgcttggtttgcttactggggccagggcaccctggtcaccgtgtcatctgcatccaccaagggcccatcggtcttccccctggcaccctcctccaagagcacctctgggggcacagcggccctgggctgcctggtcaaggactacttccccgaaccggtgacggtgtcgtggaactcaggcgccctgaccagcggcgtgcacaccttcccggctgtcctacagtcctcaggactctactccctcagcagcgtggtgaccgtgccctccagcagcttgggcacccagacctacatctgcaacgtgaatcacaagcccagcaacaccaaggtggacaagaaagttgagcccaaatcttgtgacaaaactcacacatgcccaccgtgcccagcacctgaactcctggggggaccgtcagtcttcctcttccccccaaaacccaaggacaccctcatgatctcccggacccctgaggtcacatgcgtggtggtggacgtgagccacgaagaccctgaggtcaagttcaactggtacgtggacggcgtggaggtgcataatgccaagacaaagccgcgggaggagcagtacaacagcacgtaccgtgtggtcagcgtcctcaccgtcctgcaccaggactggctgaatggcaaggagtacaagtgcaaggtctccaacaaagccctcccagcccccatcgagaaaaccatctccaaagccaaagggcagccccgagaaccacaggtgtacaccctgcccccatcccgggatgagctgaccaagaaccaggtcagcctgacctgcctggtcaaaggcttctatcccagcgacatcgccgtggagtgggagagcaatgggcagccggagaacaactacaagaccacgcctcccgtgctggactccgacggctccttcttcttatattcaaagctcaccgtggacaagagcaggtggcagcaggggaacgtcttctcatgctccgtgatgcatgaggctctgcacaaccactacacgcagaagagcctctccctgtctcccgggaaatga

SEQ ID NO: 353 - protein, 468 aa, synthetic construct
  REGION 1..468: note = Description of Artificial Sequence: Synthetic polypeptide
MGWSCIILFLVATATGVHSEVQLLESGGGLVQPGGSLRLSCAASGYTFTTYWITWVRQAPGKGLEWVSDIYPGSSICNYNEKFKSRFTISRDNSKNTLYLQMNSLRAEDTAVYYCAREDGYDAWFAYWGQGTLVTVSSASTKGPSVFPLAPSSKSTSGGTAALGCLVKDYFPEPVTVSWNSGALTSGVHTFPAVLQSSGLYSLSSVVTVPSSSLGTQTYICNVNHKPSNTKVDKKVEPKSCDKTHTCPPCPAPELLGGPSVFLFPPKPKDTLMISRTPEVTCVVVDVSHEDPEVKFNWYVDGVEVHNAKTKPREEQYNSTYRVVSVLTVLHQDWLNGKEYKCKVSNKALPAPIEKTISKAKGQPREPQVYTLPPSRDELTKNQVSLTCLVKGFYPSDIAVEWESNGQPENNYKTTPPVLDSDGSFFLYSKLTVDKSRWQQGNVFSCSVMHEALHNHYTQKSLSLSPGK

SEQ ID NO: 354 - protein, 449 aa, synthetic construct
  REGION 1..449: note = Description of Artificial Sequence: Synthetic polypeptide
EVQLLESGGGLVQPGGSLRLSCAASGYTFTTYWITWVRQAPGKGLEWVSDIYPGSSICNYNEKFKSRFTISRDNSKNTLYLQMNSLRAEDTAVYYCAREDGYDAWFAYWGQGTLVTVSSASTKGPSVFPLAPSSKSTSGGTAALGCLVKDYFPEPVTVSWNSGALTSGVHTFPAVLQSSGLYSLSSVVTVPSSSLGTQTYICNVNHKPSNTKVDKKVEPKSCDKTHTCPPCPAPELLGGPSVFLFPPKPKDTLMISRTPEVTCVVVDVSHEDPEVKFNWYVDGVEVHNAKTKPREEQYNSTYRVVSVLTVLHQDWLNGKEYKCKVSNKALPAPIEKTISKAKGQPREPQVYTLPPSRDELTKNQVSLTCLVKGFYPSDIAVEWESNGQPENNYKTTPPVLDSDGSFFLYSKLTVDKSRWQQGNVFSCSVMHEALHNHYTQKSLSLSPGK

SEQ ID NO: 355 - DNA, 57 bp, synthetic construct; identical to SEQ ID NO: 203
  misc_feature 1..57: note = Description of Artificial Sequence: Synthetic oligonucleotide
  source 1..57: mol_type = other DNA

SEQ ID NO: 356 - DNA, 357 bp, synthetic construct
  misc_feature 1..357: note = Description of Artificial Sequence: Synthetic polynucleotide
  source 1..357: mol_type = other DNA
gaagtgcagctgctggaatctggcggcggactggtgcagcctggcggctctctgagactgtcttgtgccgcctccggctacaccttcaccacctactggatcacctgggtccgacaggctcccggcaagggactggaatgggtctccgacatctaccccggctcctccatctgcaactacaacgagaagttcaagtcccggttcaccatctcccgggacaactccaagaacaccctgtacctccagatgaactccctgagagccgaggacaccgccgtgtactactgcgccagagaggacggctacgacgcttggtttgcttactggggccagggcaccctggtcaccgtgtcatct

SEQ ID NO: 357 - protein, 119 aa, synthetic construct
  REGION 1..119: note = Description of Artificial Sequence: Synthetic polypeptide
EVQLLESGGGLVQPGGSLRLSCAASGYTFTTYWITWVRQAPGKGLEWVSDIYPGSSICNYNEKFKSRFTISRDNSKNTLYLQMNSLRAEDTAVYYCAREDGYDAWFAYWGQGTLVTVSS

SEQ ID NO: 358 - DNA, 987 bp, synthetic construct; identical to SEQ ID NO: 206
  misc_feature 1..987: note = Description of Artificial Sequence: Synthetic polynucleotide
  source 1..987: mol_type = other DNA

SEQ ID NO: 359 - protein, 330 aa, synthetic construct [sequence omitted]

SEQ ID NO: 360 - DNA, 1407 bp, synthetic construct
  misc_feature 1..1407: note = Description of Artificial Sequence: Synthetic polynucleotide
  source 1..1407: mol_type = other DNA
atgggctggtcctgcatcatcctgtttctggtggccaccgccaccggcgtgcacagcgaagtgcagctgctggaatctggcggcggactggtgcagcctggcggctctctgagactgtcttgtgccgcctccggctacaccttcaccacctactggatcacctgggtccgacaggctcccggcaagggactggaatgggtctccgacatctaccccggctcctccatctgcaactacgccgacaagttcaagggccggttcaccatctcccgggacaactccaagaacaccctgtacctccagatgaactccctgagagccgaggacaccgccgtgtactactgcgccagagaggacggctacgacgcttggtttgcttactggggccagggcaccctggtcaccgtgtcatctgcatccaccaagggcccatcggtcttccccctggcaccctcctccaagagcacctctgggggcacagcggccctgggctgcctggtcaaggactacttccccgaaccggtgacggtgtcgtggaactcaggcgccctgaccagcggcgtgcacaccttcccggctgtcctacagtcctcaggactctactccctcagcagcgtggtgaccgtgccctccagcagcttgggcacccagacctacatctgcaacgtgaatcacaagcccagcaacaccaaggtggacaagaaagttgagcccaaatcttgtgacaaaactcacacatgcccaccgtgcccagcacctgaactcctggggggaccgtcagtcttcctcttccccccaaaacccaaggacaccctcatgatctcccggacccctgaggtcacatgcgtggtggtggacgtgagccacgaagaccctgaggtcaagttcaactggtacgtggacggcgtggaggtgcataatgccaagacaaagccgcgggaggagcagtacaacagcacgtaccgtgtggtcagcgtcctcaccgtcctgcaccaggactggctgaatggcaaggagtacaagtgcaaggtctccaacaaagccctcccagcccccatcgagaaaaccatctccaaagccaaagggcagccccgagaaccacaggtgtacaccctgcccccatcccgggatgagctgaccaagaaccaggtcagcctgacctgcctggtcaaaggcttctatcccagcgacatcgccgtggagtgggagagcaatgggcagccggagaacaactacaagaccacgcctcccgtgctggactccgacggctccttcttcttatattcaaagctcaccgtggacaagagcaggtggcagcaggggaacgtcttctcatgctccgtgatgcatgaggctctgcacaaccactacacgcagaagagcctctccctgtctcccgggaaatga

SEQ ID NO: 361 - DNA, 1350 bp, synthetic construct
  misc_feature 1..1350: note = Description of Artificial Sequence: Synthetic polynucleotide
  source 1..1350: mol_type = other DNA
gaagtgcagctgctggaatctggcggcggactggtgcagcctggcggctctctgagactgtcttgtgccgcctccggctacaccttcaccacctactggatcacctgggtccgacaggctcccggcaagggactggaatgggtctccgacatctaccccggctcctccatctgcaactacgccgacaagttcaagggccggttcaccatctcccgggacaactccaagaacaccctgtacctccagatgaactccctgagagccgaggacaccgccgtgtactactgcgccagagaggacggctacgacgcttggtttgcttactggggccagggcaccctggtcaccgtgtcatctgcatccaccaagggcccatcggtcttccccctggcaccctcctccaagagcacctctgggggcacagcggccctgggctgcctggtcaaggactacttccccgaaccggtgacggtgtcgtggaactcaggcgccctgaccagcggcgtgcacaccttcccggctgtcctacagtcctcaggactctactccctcagcagcgtggtgaccgtgccctccagcagcttgggcacccagacctacatctgcaacgtgaatcacaagcccagcaacaccaaggtggacaagaaagttgagcccaaatcttgtgacaaaactcacacatgcccaccgtgcccagcacctgaactcctggggggaccgtcagtcttcctcttccccccaaaacccaaggacaccctcatgatctcccggacccctgaggtcacatgcgtggtggtggacgtgagccacgaagaccctgaggtcaagttcaactggtacgtggacggcgtggaggtgcataatgccaagacaaagccgcgggaggagcagtacaacagcacgtaccgtgtggtcagcgtcctcaccgtcctgcaccaggactggctgaatggcaaggagtacaagtgcaaggtctccaacaaagccctcccagcccccatcgagaaaaccatctccaaagccaaagggcagccccgagaaccacaggtgtacaccctgcccccatcccgggatgagctgaccaagaaccaggtcagcctgacctgcctggtcaaaggcttctatcccagcgacatcgccgtggagtgggagagcaatgggcagccggagaacaactacaagaccacgcctcccgtgctggactccgacggctccttcttcttatattcaaagctcaccgtggacaagagcaggtggcagcaggggaacgtcttctcatgctccgtgatgcatgaggctctgcacaaccactacacgcagaagagcctctccctgtctcccgggaaatga

SEQ ID NO: 362 - protein, 468 aa, synthetic construct
  REGION 1..468: note = Description of Artificial Sequence: Synthetic polypeptide
MGWSCIILFLVATATGVHSEVQLLESGGGLVQPGGSLRLSCAASGYTFTTYWITWVRQAPGKGLEWVSDIYPGSSICNYADKFKGRFTISRDNSKNTLYLQMNSLRAEDTAVYYCAREDGYDAWFAYWGQGTLVTVSSASTKGPSVFPLAPSSKSTSGGTAALGCLVKDYFPEPVTVSWNSGALTSGVHTFPAVLQSSGLYSLSSVVTVPSSSLGTQTYICNVNHKPSNTKVDKKVEPKSCDKTHTCPPCPAPELLGGPSVFLFPPKPKDTLMISRTPEVTCVVVDVSHEDPEVKFNWYVDGVEVHNAKTKPREEQYNSTYRVVSVLTVLHQDWLNGKEYKCKVSNKALPAPIEKTISKAKGQPREPQVYTLPPSRDELTKNQVSLTCLVKGFYPSDIAVEWESNGQPENNYKTTPPVLDSDGSFFLYSKLTVDKSRWQQGNVFSCSVMHEALHNHYTQKSLSLSPGK

SEQ ID NO: 363 - protein, 449 aa, synthetic construct
  REGION 1..449: note = Description of Artificial Sequence: Synthetic polypeptide
EVQLLESGGGLVQPGGSLRLSCAASGYTFTTYWITWVRQAPGKGLEWVSDIYPGSSICNYADKFKGRFTISRDNSKNTLYLQMNSLRAEDTAVYYCAREDGYDAWFAYWGQGTLVTVSSASTKGPSVFPLAPSSKSTSGGTAALGCLVKDYFPEPVTVSWNSGALTSGVHTFPAVLQSSGLYSLSSVVTVPSSSLGTQTYICNVNHKPSNTKVDKKVEPKSCDKTHTCPPCPAPELLGGPSVFLFPPKPKDTLMISRTPEVTCVVVDVSHEDPEVKFNWYVDGVEVHNAKTKPREEQYNSTYRVVSVLTVLHQDWLNGKEYKCKVSNKALPAPIEKTISKAKGQPREPQVYTLPPSRDELTKNQVSLTCLVKGFYPSDIAVEWESNGQPENNYKTTPPVLDSDGSFFLYSKLTVDKSRWQQGNVFSCSVMHEALHNHYTQKSLSLSPGK

SEQ ID NO: 364 - DNA, 57 bp, synthetic construct; identical to SEQ ID NO: 203
  misc_feature 1..57: note = Description of Artificial Sequence: Synthetic oligonucleotide
  source 1..57: mol_type = other DNA

SEQ ID NO: 365 - DNA, 357 bp, synthetic construct
  misc_feature 1..357: note = Description of Artificial Sequence: Synthetic polynucleotide
  source 1..357: mol_type = other DNA
gaagtgcagctgctggaatctggcggcggactggtgcagcctggcggctctctgagactgtcttgtgccgcctccggctacaccttcaccacctactggatcacctgggtccgacaggctcccggcaagggactggaatgggtctccgacatctaccccggctcctccatctgcaactacgccgacaagttcaagggccggttcaccatctcccgggacaactccaagaacaccctgtacctccagatgaactccctgagagccgaggacaccgccgtgtactactgcgccagagaggacggctacgacgcttggtttgcttactggggccagggcaccctggtcaccgtgtcatct

SEQ ID NO: 366 - protein, 119 aa, synthetic construct
  REGION 1..119: note = Description of Artificial Sequence: Synthetic polypeptide
EVQLLESGGGLVQPGGSLRLSCAASGYTFTTYWITWVRQAPGKGLEWVSDIYPGSSICNYADKFKGRFTISRDNSKNTLYLQMNSLRAEDTAVYYCAREDGYDAWFAYWGQGTLVTVSS

SEQ ID NO: 367 - DNA, 987 bp, synthetic construct; identical to SEQ ID NO: 206
  misc_feature 1..987: note = Description of Artificial Sequence: Synthetic polynucleotide
  source 1..987: mol_type = other DNA

SEQ ID NO: 368 - protein, 330 aa, synthetic construct [sequence omitted]

SEQ ID NO: 369 - DNA, 1407 bp, synthetic construct
  misc_feature 1..1407: note = Description of Artificial Sequence: Synthetic polynucleotide
  source 1..1407: mol_type = other DNA
atgggctggtcctgcatcatcctgtttctggtggccaccgccaccggcgtgcacagcgaagtgcagctgctggaatctggcggcggactggtgcagcctggcggctctctgagactgtcttgtgccgcctccggctacaccttcaccacctactggatcacctgggtccgacaggctcccggcaagggactggaatgggtctccgacatctaccccggctcctccatctgcaactacgccgacaagttcaagggccggttcaccatctcccgggacaactccaagaacaccctgtacctccagatgaactccctgagagccgaggacaccgccgtgtactactgcgccaaagaggacggctacgacgcttggtttgcttactggggccagggcaccctggtcaccgtgtcatctgcatccaccaagggcccatcggtcttccccctggcaccctcctccaagagcacctctgggggcacagcggccctgggctgcctggtcaaggactacttccccgaaccggtgacggtgtcgtggaactcaggcgccctgaccagcggcgtgcacaccttcccggctgtcctacagtcctcaggactctactccctcagcagcgtggtgaccgtgccctccagcagcttgggcacccagacctacatctgcaacgtgaatcacaagcccagcaacaccaaggtggacaagaaagttgagcccaaatcttgtgacaaaactcacacatgcccaccgtgcccagcacctgaactcctggggggaccgtcagtcttcctcttccccccaaaacccaaggacaccctcatgatctcccggacccctgaggtcacatgcgtggtggtggacgtgagccacgaagaccctgaggtcaagttcaactggtacgtggacggcgtggaggtgcataatgccaagacaaagccgcgggaggagcagtacaacagcacgtaccgtgtggtcagcgtcctcaccgtcctgcaccaggactggctgaatggcaaggagtacaagtgcaaggtctccaacaaagccctcccagcccccatcgagaaaaccatctccaaagccaaagggcagccccgagaaccacaggtgtacaccctgcccccatcccgggatgagctgaccaagaaccaggtcagcctgacctgcctggtcaaaggcttctatcccagcgacatcgccgtggagtgggagagcaatgggcagccggagaacaactacaagaccacgcctcccgtgctggactccgacggctccttcttcttatattcaaagctcaccgtggacaagagcaggtggcagcaggggaacgtcttctcatgctccgtgatgcatgaggctctgcacaaccactacacgcagaagagcctctccctgtctcccgggaaatga

SEQ ID NO: 370 - DNA, 1350 bp, synthetic construct
  misc_feature 1..1350: note = Description of Artificial Sequence: Synthetic polynucleotide
  source 1..1350: mol_type = other DNA
gaagtgcagctgctggaatctggcggcggactggtgcagcctggcggctctctgagactgtcttgtgccgcctccggctacaccttcaccacctactggatcacctgggtccgacaggctcccggcaagggactggaatgggtctccgacatctaccccggctcctccatctgcaactacgccgacaagttcaagggccggttcaccatctcccgggacaactccaagaacaccctgtacctccagatgaactccctgagagccgaggacaccgccgtgtactactgcgccaaagaggacggctacgacgcttggtttgcttactggggccagggcaccctggtcaccgtgtcatctgcatccaccaagggcccatcggtcttccccctggcaccctcctccaagagcacctctgggggcacagcggccctgggctgcctggtcaaggactacttccccgaaccggtgacggtgtcgtggaactcaggcgccctgaccagcggcgtgcacaccttcccggctgtcctacagtcctcaggactctactccctcagcagcgtggtgaccgtgccctccagcagcttgggcacccagacctacatctgcaacgtgaatcacaagcccagcaacaccaaggtggacaagaaagttgagcccaaatcttgtgacaaaactcacacatgcccaccgtgcccagcacctgaactcctggggggaccgtcagtcttcctcttccccccaaaacccaaggacaccctcatgatctcccggacccctgaggtcacatgcgtggtggtggacgtgagccacgaagaccctgaggtcaagttcaactggtacgtggacggcgtggaggtgcataatgccaagacaaagccgcgggaggagcagtacaacagcacgtaccgtgtggtcagcgtcctcaccgtcctgcaccaggactggctgaatggcaaggagtacaagtgcaaggtctccaacaaagccctcccagcccccatcgagaaaaccatctccaaagccaaagggcagccccgagaaccacaggtgtacaccctgcccccatcccgggatgagctgaccaagaaccaggtcagcctgacctgcctggtcaaaggcttctatcccagcgacatcgccgtggagtgggagagcaatgggcagccggagaacaactacaagaccacgcctcccgtgctggactccgacggctccttcttcttatattcaaagctcaccgtggacaagagcaggtggcagcaggggaacgtcttctcatgctccgtgatgcatgaggctctgcacaaccactacacgcagaagagcctctccctgtctcccgggaaatga

SEQ ID NO: 371 - protein, 468 aa, synthetic construct
  REGION 1..468: note = Description of Artificial Sequence: Synthetic polypeptide
MGWSCIILFLVATATGVHSEVQLLESGGGLVQPGGSLRLSCAASGYTFTTYWITWVRQAPGKGLEWVSDIYPGSSICNYADKFKGRFTISRDNSKNTLYLQMNSLRAEDTAVYYCAKEDGYDAWFAYWGQGTLVTVSSASTKGPSVFPLAPSSKSTSGGTAALGCLVKDYFPEPVTVSWNSGALTSGVHTFPAVLQSSGLYSLSSVVTVPSSSLGTQTYICNVNHKPSNTKVDKKVEPKSCDKTHTCPPCPAPELLGGPSVFLFPPKPKDTLMISRTPEVTCVVVDVSHEDPEVKFNWYVDGVEVHNAKTKPREEQYNSTYRVVSVLTVLHQDWLNGKEYKCKVSNKALPAPIEKTISKAKGQPREPQVYTLPPSRDELTKNQVSLTCLVKGFYPSDIAVEWESNGQPENNYKTTPPVLDSDGSFFLYSKLTVDKSRWQQGNVFSCSVMHEALHNHYTQKSLSLSPGK

SEQ ID NO: 372 - protein, 449 aa, synthetic construct
  REGION 1..449: note = Description of Artificial Sequence: Synthetic polypeptide
EVQLLESGGGLVQPGGSLRLSCAASGYTFTTYWITWVRQAPGKGLEWVSDIYPGSSICNYADKFKGRFTISRDNSKNTLYLQMNSLRAEDTAVYYCAKEDGYDAWFAYWGQGTLVTVSSASTKGPSVFPLAPSSKSTSGGTAALGCLVKDYFPEPVTVSWNSGALTSGVHTFPAVLQSSGLYSLSSVVTVPSSSLGTQTYICNVNHKPSNTKVDKKVEPKSCDKTHTCPPCPAPELLGGPSVFLFPPKPKDTLMISRTPEVTCVVVDVSHEDPEVKFNWYVDGVEVHNAKTKPREEQYNSTYRVVSVLTVLHQDWLNGKEYKCKVSNKALPAPIEKTISKAKGQPREPQVYTLPPSRDELTKNQVSLTCLVKGFYPSDIAVEWESNGQPENNYKTTPPVLDSDGSFFLYSKLTVDKSRWQQGNVFSCSVMHEALHNHYTQKSLSLSPGK

SEQ ID NO: 373 - DNA, 57 bp, synthetic construct; identical to SEQ ID NO: 203
  misc_feature 1..57: note = Description of Artificial Sequence: Synthetic oligonucleotide
  source 1..57: mol_type = other DNA

SEQ ID NO: 374 - DNA, 357 bp, synthetic construct
  misc_feature 1..357: note = Description of Artificial Sequence: Synthetic polynucleotide
  source 1..357: mol_type = other DNA
gaagtgcagctgctggaatctggcggcggactggtgcagcctggcggctctctgagactgtcttgtgccgcctccggctacaccttcaccacctactggatcacctgggtccgacaggctcccggcaagggactggaatgggtctccgacatctaccccggctcctccatctgcaactacgccgacaagttcaagggccggttcaccatctcccgggacaactccaagaacaccctgtacctccagatgaactccctgagagccgaggacaccgccgtgtactactgcgccaaagaggacggctacgacgcttggtttgcttactggggccagggcaccctggtcaccgtgtcatct

SEQ ID NO: 375 - protein, 119 aa, synthetic construct
  REGION 1..119: note = Description of Artificial Sequence: Synthetic polypeptide
EVQLLESGGGLVQPGGSLRLSCAASGYTFTTYWITWVRQAPGKGLEWVSDIYPGSSICNYADKFKGRFTISRDNSKNTLYLQMNSLRAEDTAVYYCAKEDGYDAWFAYWGQGTLVTVSS

SEQ ID NO: 376 - DNA, 987 bp, synthetic construct; identical to SEQ ID NO: 206
  misc_feature 1..987: note = Description of Artificial Sequence: Synthetic polynucleotide
  source 1..987: mol_type = other DNA

SEQ ID NO: 377 - protein, 330 aa, synthetic construct [sequence omitted]

SEQ ID NO: 378 - DNA, 1407 bp, synthetic construct
  misc_feature 1..1407: note = Description of Artificial Sequence: Synthetic polynucleotide
  source 1..1407: mol_type = other DNA
atgggctggtcctgcatcatcctgtttctggtggccaccgccaccggcgtgcacagcgaagtgcagctgctggaatctggcggcggactggtgcagcctggcggctctctgagactgtcttgtgccgcctccggctacaccttcaccacctactggatcacctgggtccgacaggctcccggcaagggactggaatgggtgtccgacatctaccccggctcctccatctccaactacgccgactccgtcaagggccggttcaccatctcccgggacaactccaagaacaccctgtacctccagatgaactccctgcgggccgaggacaccgccgtgtactactgcgccagagaggacggctacgacgcttggtttgcctactggggccagggcaccctggtcaccgtgtcatctgcctccaccaagggcccatcggtcttccccctggcaccctcctccaagagcacctctgggggcacagcggccctgggctgcctggtcaaggactacttccccgaaccggtgacggtgtcgtggaactcaggcgccctgaccagcggcgtgcacaccttcccggctgtcctacagtcctcaggactctactccctcagcagcgtggtgaccgtgccctccagcagcttgggcacccagacctacatctgcaacgtgaatcacaagcccagcaacaccaaggtggacaagaaagttgagcccaaatcttgtgacaaaactcacacatgcccaccgtgcccagcacctgaactcctggggggaccgtcagtcttcctcttccccccaaaacccaaggacaccctcatgatctcccggacccctgaggtcacatgcgtggtggtggacgtgagccacgaagaccctgaggtcaagttcaactggtacgtggacggcgtggaggtgcataatgccaagacaaagccgcgggaggagcagtacaacagcacgtaccgtgtggtcagcgtcctcaccgtcctgcaccaggactggctgaatggcaaggagtacaagtgcaaggtctccaacaaagccctcccagcccccatcgagaaaaccatctccaaagccaaagggcagccccgagaaccacaggtgtacaccctgcccccatcccgggatgagctgaccaagaaccaggtcagcctgacctgcctggtcaaaggcttctatcccagcgacatcgccgtggagtgggagagcaatgggcagccggagaacaactacaagaccacgcctcccgtgctggactccgacggctccttcttcttatattcaaagctcaccgtggacaagagcaggtggcagcaggggaacgtcttctcatgctccgtgatgcatgaggctctgcacaaccactacacgcagaagagcctctccctgtctcccgggaaatga

SEQ ID NO: 379 - DNA, 1350 bp, synthetic construct
  misc_feature 1..1350: note = Description of Artificial Sequence: Synthetic polynucleotide
  source 1..1350: mol_type = other DNA
gaagtgcagctgctggaatctggcggcggactggtgcagcctggcggctctctgagactgtcttgtgccgcctccggctacaccttcaccacctactggatcacctgggtccgacaggctcccggcaagggactggaatgggtgtccgacatctaccccggctcctccatctccaactacgccgactccgtcaagggccggttcaccatctcccgggacaactccaagaacaccctgtacctccagatgaactccctgcgggccgaggacaccgccgtgtactactgcgccagagaggacggctacgacgcttggtttgcctactggggccagggcaccctggtcaccgtgtcatctgcctccaccaagggcccatcggtcttccccctggcaccctcctccaagagcacctctgggggcacagcggccctgggctgcctggtcaaggactacttccccgaaccggtgacggtgtcgtggaactcaggcgccctgaccagcggcgtgcacaccttcccggctgtcctacagtcctcaggactctactccctcagcagcgtggtgaccgtgccctccagcagcttgggcacccagacctacatctgcaacgtgaatcacaagcccagcaacaccaaggtggacaagaaagttgagcccaaatcttgtgacaaaactcacacatgcccaccgtgcccagcacctgaactcctggggggaccgtcagtcttcctcttccccccaaaacccaaggacaccctcatgatctcccggacccctgaggtcacatgcgtggtggtggacgtgagccacgaagaccctgaggtcaagttcaactggtacgtggacggcgtggaggtgcataatgccaagacaaagccgcgggaggagcagtacaacagcacgtaccgtgtggtcagcgtcctcaccgtcctgcaccaggactggctgaatggcaaggagtacaagtgcaaggtctccaacaaagccctcccagcccccatcgagaaaaccatctccaaagccaaagggcagccccgagaaccacaggtgtacaccctgcccccatcccgggatgagctgaccaagaaccaggtcagcctgacctgcctggtcaaaggcttctatcccagcgacatcgccgtggagtgggagagcaatgggcagccggagaacaactacaagaccacgcctcccgtgctggactccgacggctccttcttcttatattcaaagctcaccgtggacaagagcaggtggcagcaggggaacgtcttctcatgctccgtgatgcatgaggctctgcacaaccactacacgcagaagagcctctccctgtctcccgggaaatga

SEQ ID NO: 380 - protein, 468 aa, synthetic construct
  REGION 1..468: note = Description of Artificial Sequence: Synthetic polypeptide
MGWSCIILFLVATATGVHSEVQLLESGGGLVQPGGSLRLSCAASGYTFTTYWITWVRQAPGKGLEWVSDIYPGSSISNYADSVKGRFTISRDNSKNTLYLQMNSLRAEDTAVYYCAREDGYDAWFAYWGQGTLVTVSSASTKGPSVFPLAPSSKSTSGGTAALGCLVKDYFPEPVTVSWNSGALTSGVHTFPAVLQSSGLYSLSSVVTVPSSSLGTQTYICNVNHKPSNTKVDKKVEPKSCDKTHTCPPCPAPELLGGPSVFLFPPKPKDTLMISRTPEVTCVVVDVSHEDPEVKFNWYVDGVEVHNAKTKPREEQYNSTYRVVSVLTVLHQDWLNGKEYKCKVSNKALPAPIEKTISKAKGQPREPQVYTLPPSRDELTKNQVSLTCLVKGFYPSDIAVEWESNGQPENNYKTTPPVLDSDGSFFLYSKLTVDKSRWQQGNVFSCSVMHEALHNHYTQKSLSLSPGK

SEQ ID NO: 381 - protein, 449 aa, synthetic construct
  REGION 1..449: note = Description of Artificial Sequence: Synthetic polypeptide
EVQLLESGGGLVQPGGSLRLSCAASGYTFTTYWITWVRQAPGKGLEWVSDIYPGSSISNYADSVKGRFTISRDNSKNTLYLQMNSLRAEDTAVYYCAREDGYDAWFAYWGQGTLVTVSSASTKGPSVFPLAPSSKSTSGGTAALGCLVKDYFPEPVTVSWNSGALTSGVHTFPAVLQSSGLYSLSSVVTVPSSSLGTQTYICNVNHKPSNTKVDKKVEPKSCDKTHTCPPCPAPELLGGPSVFLFPPKPKDTLMISRTPEVTCVVVDVSHEDPEVKFNWYVDGVEVHNAKTKPREEQYNSTYRVVSVLTVLHQDWLNGKEYKCKVSNKALPAPIEKTISKAKGQPREPQVYTLPPSRDELTKNQVSLTCLVKGFYPSDIAVEWESNGQPENNYKTTPPVLDSDGSFFLYSKLTVDKSRWQQGNVFSCSVMHEALHNHYTQKSLSLSPGK

SEQ ID NO: 382 - DNA, 57 bp, synthetic construct; identical to SEQ ID NO: 203
  misc_feature 1..57: note = Description of Artificial Sequence: Synthetic oligonucleotide
  source 1..57: mol_type = other DNA

SEQ ID NO: 383 - DNA, 357 bp, synthetic construct
  misc_feature 1..357: note = Description of Artificial Sequence: Synthetic polynucleotide
  source 1..357: mol_type = other DNA
gaagtgcagctgctggaatctggcggcggactggtgcagcctggcggctctctgagactgtcttgtgccgcctccggctacaccttcaccacctactggatcacctgggtccgacaggctcccggcaagggactggaatgggtgtccgacatctaccccggctcctccatctccaactacgccgactccgtcaagggccggttcaccatctcccgggacaactccaagaacaccctgtacctccagatgaactccctgcgggccgaggacaccgccgtgtactactgcgccagagaggacggctacgacgcttggtttgcctactggggccagggcaccctggtcaccgtgtcatct

SEQ ID NO: 384 - protein, 119 aa, synthetic construct
  REGION 1..119: note = Description of Artificial Sequence: Synthetic polypeptide
EVQLLESGGGLVQPGGSLRLSCAASGYTFTTYWITWVRQAPGKGLEWVSDIYPGSSISNYADSVKGRFTISRDNSKNTLYLQMNSLRAEDTAVYYCAREDGYDAWFAYWGQGTLVTVSS

SEQ ID NO: 385 - DNA, 987 bp, synthetic construct
  misc_feature 1..987: note = Description of Artificial Sequence: Synthetic polynucleotide
  source 1..987: mol_type = other DNA
gcctccaccaagggcccatcggtcttccccctggcaccctcctccaagagcacctctgggggcacagcggccctgggctgcctggtcaaggactacttccccgaaccggtgacggtgtcgtggaactcaggcgccctgaccagcggcgtgcacaccttcccggctgtcctacagtcctcaggactctactccctcagcagcgtggtgaccgtgccctccagcagcttgggcacccagacctacatctgcaacgtgaatcacaagcccagcaacaccaaggtggacaagaaagttgagcccaaatcttgtgacaaaactcacacatgcccaccgtgcccagcacctgaactcctggggggaccgtcagtcttcctcttccccccaaaacccaaggacaccctcatgatctcccggacccctgaggtcacatgcgtggtggtggacgtgagccacgaagaccctgaggtcaagttcaactggtacgtggacggcgtggaggtgcataatgccaagacaaagccgcgggaggagcagtacaacagcacgtaccgtgtggtcagcgtcctcaccgtcctgcaccaggactggctgaatggcaaggagtacaagtgcaaggtctccaacaaagccctcccagcccccatcgagaaaaccatctccaaagccaaagggcagccccgagaaccacaggtgtacaccctgcccccatcccgggatgagctgaccaagaaccaggtcagcctgacctgcctggtcaaaggcttctatcccagcgacatcgccgtggagtgggagagcaatgggcagccggagaacaactacaagaccacgcctcccgtgctggactccgacggctccttcttcttatattcaaagctcaccgtggacaagagcaggtggcagcaggggaacgtcttctcatgctccgtgatgcatgaggctctgcacaaccactacacgcagaagagcctctccctgtctcccggg

SEQ ID NO: 386 - protein, 330 aa, synthetic construct [sequence omitted]

SEQ ID NO: 387 - DNA, 1407 bp, synthetic construct
  misc_feature 1..1407: note = Description of Artificial Sequence: Synthetic polynucleotide
  source 1..1407: mol_type = other DNA
atgggctggtcctgcatcatcctgtttctggtggccaccgccaccggcgtgcacagcgaagtgcagctgctggaatctggcggcggactggtgcagcctggcggctctctgagactgtcttgtgccgcctccggctacaccttcaccacctactggatcacctgggtccgacaggctcccggcaagggactggaatgggtgtccgacatctaccccggctcctccatctccaactacaacgagaagttcaagtcccggttcaccatctcccgggacaactccaagaacaccctgtacctccagatgaactccctgcgggccgaggacaccgccgtgtactactgcgccagagaggacggctacgacgcttggtttgcctactggggccagggcaccctggtcaccgtgtcatctgcctccaccaagggcccatcggtcttccccctggcaccctcctccaagagcacctctgggggcacagcggccctgggctgcctggtcaaggactacttccccgaaccggtgacggtgtcgtggaactcaggcgccctgaccagcggcgtgcacaccttcccggctgtcctacagtcctcaggactctactccctcagcagcgtggtgaccgtgccctccagcagcttgggcacccagacctacatctgcaacgtgaatcacaagcccagcaacaccaaggtggacaagaaagttgagcccaaatcttgtgacaaaactcacacatgcccaccgtgcccagcacctgaactcctggggggaccgtcagtcttcctcttccccccaaaacccaaggacaccctcatgatctcccggacccctgaggtcacatgcgtggtggtggacgtgagccacgaagaccctgaggtcaagttcaactggtacgtggacggcgtggaggtgcataatgccaagacaaagccgcgggaggagcagtacaacagcacgtaccgtgtggtcagcgtcctcaccgtcctgcaccaggactggctgaatggcaaggagtacaagtgcaaggtctccaacaaagccctcccagcccccatcgagaaaaccatctccaaagccaaagggcagccccgagaaccacaggtgtacaccctgcccccatcccgggatgagctgaccaagaaccaggtcagcctgacctgcctggtcaaaggcttctatcccagcgacatcgccgtggagtgggagagcaatgggcagccggagaacaactacaagaccacgcctcccgtgctggactccgacggctccttcttcttatattcaaagctcaccgtggacaagagcaggtggcagcaggggaacgtcttctcatgctccgtgatgcatgaggctctgcacaaccactacacgcagaagagcctctccctgtctcccgggaaatga

SEQ ID NO: 388 - DNA, 1350 bp, synthetic construct
  misc_feature 1..1350: note = Description of Artificial Sequence: Synthetic polynucleotide
  source 1..1350: mol_type = other DNA
gaagtgcagctgctggaatctggcggcggactggtgcagcctggcggctctctgagactgtcttgtgccgcctccggctacaccttcaccacctactggatcacctgggtccgacaggctcccggcaagggactggaatgggtgtccgacatctaccccggctcctccatctccaactacaacgagaagttcaagtcccggttcaccatctcccgggacaactccaagaacaccctgtacctccagatgaactccctgcgggccgaggacaccgccgtgtactactgcgccagagaggacggctacgacgcttggtttgcctactggggccagggcaccctggtcaccgtgtcatctgcctccaccaagggcccatcggtcttccccctggcaccctcctccaagagcacctctgggggcacagcggccctgggctgcctggtcaaggactacttccccgaaccggtgacggtgtcgtggaactcaggcgccctgaccagcggcgtgcacaccttcccggctgtcctacagtcctcaggactctactccctcagcagcgtggtgaccgtgccctccagcagcttgggcacccagacctacatctgcaacgtgaatcacaagcccagcaacaccaaggtggacaagaaagttgagcccaaatcttgtgacaaaactcacacatgcccaccgtgcccagcacctgaactcctggggggaccgtcagtcttcctcttccccccaaaacccaaggacaccctcatgatctcccggacccctgaggtcacatgcgtggtggtggacgtgagccacgaagaccctgaggtcaagttcaactggtacgtggacggcgtggaggtgcataatgccaagacaaagccgcgggaggagcagtacaacagcacgtaccgtgtggtcagcgtcctcaccgtcctgcaccaggactggctgaatggcaaggagtacaagtgcaaggtctccaacaaagccctcccagcccccatcgagaaaaccatctccaaagccaaagggcagccccgagaaccacaggtgtacaccctgcccccatcccgggatgagctgaccaagaaccaggtcagcctgacctgcctggtcaaaggcttctatcccagcgacatcgccgtggagtgggagagcaatgggcagccggagaacaactacaagaccacgcctcccgtgctggactccgacggctccttcttcttatattcaaagctcaccgtggacaagagcaggtggcagcaggggaacgtcttctcatgctccgtgatgcatgaggctctgcacaaccactacacgcagaagagcctctccctgtctcccgggaaatga

SEQ ID NO: 389 - protein, 468 aa, synthetic construct
  REGION 1..468: note = Description of Artificial Sequence: Synthetic polypeptide
MGWSCIILFLVATATGVHSEVQLLESGGGLVQPGGSLRLSCAASGYTFTTYWITWVRQAPGKGLEWVSDIYPGSSISNYNEKFKSRFTISRDNSKNTLYLQMNSLRAEDTAVYYCAREDGYDAWFAYWGQGTLVTVSSASTKGPSVFPLAPSSKSTSGGTAALGCLVKDYFPEPVTVSWNSGALTSGVHTFPAVLQSSGLYSLSSVVTVPSSSLGTQTYICNVNHKPSNTKVDKKVEPKSCDKTHTCPPCPAPELLGGPSVFLFPPKPKDTLMISRTPEVTCVVVDVSHEDPEVKFNWYVDGVEVHNAKTKPREEQYNSTYRVVSVLTVLHQDWLNGKEYKCKVSNKALPAPIEKTISKAKGQPREPQVYTLPPSRDELTKNQVSLTCLVKGFYPSDIAVEWESNGQPENNYKTTPPVLDSDGSFFLYSKLTVDKSRWQQGNVFSCSVMHEALHNHYTQKSLSLSPGK

SEQ ID NO: 390 - protein, 449 aa, synthetic construct
  REGION 1..449: note = Description of Artificial Sequence: Synthetic polypeptide
EVQLLESGGGLVQPGGSLRLSCAASGYTFTTYWITWVRQAPGKGLEWVSDIYPGSSISNYNEKFKSRFTISRDNSKNTLYLQMNSLRAEDTAVYYCAREDGYDAWFAYWGQGTLVTVSSASTKGPSVFPLAPSSKSTSGGTAALGCLVKDYFPEPVTVSWNSGALTSGVHTFPAVLQSSGLYSLSSVVTVPSSSLGTQTYICNVNHKPSNTKVDKKVEPKSCDKTHTCPPCPAPELLGGPSVFLFPPKPKDTLMISRTPEVTCVVVDVSHEDPEVKFNWYVDGVEVHNAKTKPREEQYNSTYRVVSVLTVLHQDWLNGKEYKCKVSNKALPAPIEKTISKAKGQPREPQVYTLPPSRDELTKNQVSLTCLVKGFYPSDIAVEWESNGQPENNYKTTPPVLDSDGSFFLYSKLTVDKSRWQQGNVFSCSVMHEALHNHYTQKSLSLSPGK

SEQ ID NO: 391 - DNA, 57 bp, synthetic construct; identical to SEQ ID NO: 203
  misc_feature 1..57: note = Description of Artificial Sequence: Synthetic oligonucleotide
  source 1..57: mol_type = other DNA

SEQ ID NO: 392 - DNA, 357 bp, synthetic construct
  misc_feature 1..357: note = Description of Artificial Sequence: Synthetic polynucleotide
  source 1..357: mol_type = other DNA
gaagtgcagctgctggaatctggcggcggactggtgcagcctggcggctctctgagactgtcttgtgccgcctccggctacaccttcaccacctactggatcacctgggtccgacaggctcccggcaagggactggaatgggtgtccgacatctaccccggctcctccatctccaactacaacgagaagttcaagtcccggttcaccatctcccgggacaactccaagaacaccctgtacctccagatgaactccctgcgggccgaggacaccgccgtgtactactgcgccagagaggacggctacgacgcttggtttgcctactggggccagggcaccctggtcaccgtgtcatct

SEQ ID NO: 393 - protein, 119 aa, synthetic construct
  REGION 1..119: note = Description of Artificial Sequence: Synthetic polypeptide
EVQLLESGGGLVQPGGSLRLSCAASGYTFTTYWITWVRQAPGKGLEWVSDIYPGSSISNYNEKFKSRFTISRDNSKNTLYLQMNSLRAEDTAVYYCAREDGYDAWFAYWGQGTLVTVSS

SEQ ID NO: 394 - DNA, 993 bp, synthetic construct
  misc_feature 1..993: note = Description of Artificial Sequence: Synthetic polynucleotide
  source 1..993: mol_type = other DNA
gcctccaccaagggcccatcggtcttccccctggcaccctcctccaagagcacctctgggggcacagcggccctgggctgcctggtcaaggactacttccccgaaccggtgacggtgtcgtggaactcaggcgccctgaccagcggcgtgcacaccttcccggctgtcctacagtcctcaggactctactccctcagcagcgtggtgaccgtgccctccagcagcttgggcacccagacctacatctgcaacgtgaatcacaagcccagcaacaccaaggtggacaagaaagttgagcccaaatcttgtgacaaaactcacacatgcccaccgtgcccagcacctgaactcctggggggaccgtcagtcttcctcttccccccaaaacccaaggacaccctcatgatctcccggacccctgaggtcacatgcgtggtggtggacgtgagccacgaagaccctgaggtcaagttcaactggtacgtggacggcgtggaggtgcataatgccaagacaaagccgcgggaggagcagtacaacagcacgtaccgtgtggtcagcgtcctcaccgtcctgcaccaggactggctgaatggcaaggagtacaagtgcaaggtctccaacaaagccctcccagcccccatcgagaaaaccatctccaaagccaaagggcagccccgagaaccacaggtgtacaccctgcccccatcccgggatgagctgaccaagaaccaggtcagcctgacctgcctggtcaaaggcttctatcccagcgacatcgccgtggagtgggagagcaatgggcagccggagaacaactacaagaccacgcctcccgtgctggactccgacggctccttcttcttatattcaaagctcaccgtggacaagagcaggtggcagcaggggaacgtcttctcatgctccgtgatgcatgaggctctgcacaaccactacacgcagaagagcctctccctgtctcccgggaaatga

SEQ ID NO: 395 - protein, 330 aa, synthetic construct [sequence omitted]

SEQ ID NO: 396 - DNA, 1407 bp, synthetic construct
  misc_feature 1..1407: note = Description of Artificial Sequence: Synthetic polynucleotide
  source 1..1407: mol_type = other DNA
atgggctggtcctgcatcatcctgtttctggtggccaccgccaccggcgtgcacagcgaagtgcagctgctggaatctggcggcggactggtgcagcctggcggctctctgagactgtcttgtgccgcctccggctacaccttcaccacctactggatcacctgggtccgacaggctcccggcaagggactggaatgggtctccgacatctaccccggctcctccatctccaactacaacgagaagttcaagtcccggttcaccatctccgtggacaactccaagaacaccctgtacctccagatgaactccctgagagccgaggacaccgccgtgtactactgcgccagagaggacggctacgacgcttggtttgcttactggggccagggcaccctggtcaccgtgtcatctgcatccaccaagggcccatcggtcttccccctggcaccctcctccaagagcacctctgggggcacagcggccctgggctgcctggtcaaggactacttccccgaaccggtgacggtgtcgtggaactcaggcgccctgaccagcggcgtgcacaccttcccggctgtcctacagtcctcaggactctactccctcagcagcgtggtgaccgtgccctccagcagcttgggcacccagacctacatctgcaacgtgaatcacaagcccagcaacaccaaggtggacaagaaagttgagcccaaatcttgtgacaaaactcacacatgcccaccgtgcccagcacctgaactcctggggggaccgtcagtcttcctcttccccccaaaacccaaggacaccctcatgatctcccggacccctgaggtcacatgcgtggtggtggacgtgagccacgaagaccctgaggtcaagttcaactggtacgtggacggcgtggaggtgcataatgccaagacaaagccgcgggaggagcagtacaacagcacgtaccgtgtggtcagcgtcctcaccgtcctgcaccaggactggctgaatggcaaggagtacaagtgcaaggtctccaacaaagccctcccagcccccatcgagaaaaccatctccaaagccaaagggcagccccgagaaccacaggtgtacaccctgcccccatcccgggatgagctgaccaagaaccaggtcagcctgacctgcctggtcaaaggcttctatcccagcgacatcgccgtggagtgggagagcaatgggcagccggagaacaactacaagaccacgcctcccgtgctggactccgacggctccttcttcttatattcaaagctcaccgtggacaagagcaggtggcagcaggggaacgtcttctcatgctccgtgatgcatgaggctctgcacaaccactacacgcagaagagcctctccctgtctcccgggaaatga

SEQ ID NO: 397 - DNA, 1350 bp, synthetic construct
  misc_feature 1..1350: note = Description of Artificial Sequence: Synthetic polynucleotide
  source 1..1350: mol_type = other DNA
gaagtgcagctgctggaatctggcggcggactggtgcagcctggcggctctctgagactgtcttgtgccgcctccggctacaccttcaccacctactggatcacctgggtccgacaggctcccggcaagggactggaatgggtctccgacatctaccccggctcctccatctccaactacaacgagaagttcaagtcccggttcaccatctccgtggacaactccaagaacaccctgtacctccagatgaactccctgagagccgaggacaccgccgtgtactactgcgccagagaggacggctacgacgcttggtttgcttactggggccagggcaccctggtcaccgtgtcatctgcatccaccaagggcccatcggtcttccccctggcaccctcctccaagagcacctctgggggcacagcggccctgggctgcctggtcaaggactacttccccgaaccggtgacggtgtcgtggaactcaggcgccctgaccagcggcgtgcacaccttcccggctgtcctacagtcctcaggactctactccctcagcagcgtggtgaccgtgccctccagcagcttgggcacccagacctacatctgcaacgtgaatcacaagcccagcaacaccaaggtggacaagaaagttgagcccaaatcttgtgacaaaactcacacatgcccaccgtgcccagcacctgaactcctggggggaccgtcagtcttcctcttccccccaaaacccaaggacaccctcatgatctcccggacccctgaggtcacatgcgtggtggtggacgtgagccacgaagaccctgaggtcaagttcaactggtacgtggacggcgtggaggtgcataatgccaagacaaagccgcgggaggagcagtacaacagcacgtaccgtgtggtcagcgtcctcaccgtcctgcaccaggactggctgaatggcaaggagtacaagtgcaaggtctccaacaaagccctcccagcccccatcgagaaaaccatctccaaagccaaagggcagccccgagaaccacaggtgtacaccctgcccccatcccgggatgagctgaccaagaaccaggtcagcctgacctgcctggtcaaaggcttctatcccagcgacatcgccgtggagtgggagagcaatgggcagccggagaacaactacaagaccacgcctcccgtgctggactccgacggctccttcttcttatattcaaagctcaccgtggacaagagcaggtggcagcaggggaacgtcttctcatgctccgtgatgcatgaggctctgcacaaccactacacgcagaagagcctctccctgtctcccgggaaatga

SEQ ID NO: 398 - protein, 468 aa, synthetic construct
  REGION 1..468: note = Description of Artificial Sequence: Synthetic polypeptide
MGWSCIILFLVATATGVHSEVQLLESGGGLVQPGGSLRLSCAASGYTFTTYWITWVRQAPGKGLEWVSDIYPGSSISNYNEKFKSRFTISVDNSKNTLYLQMNSLRAEDTAVYYCAREDGYDAWFAYWGQGTLVTVSSASTKGPSVFPLAPSSKSTSGGTAALGCLVKDYFPEPVTVSWNSGALTSGVHTFPAVLQSSGLYSLSSVVTVPSSSLGTQTYICNVNHKPSNTKVDKKVEPKSCDKTHTCPPCPAPELLGGPSVFLFPPKPKDTLMISRTPEVTCVVVDVSHEDPEVKFNWYVDGVEVHNAKTKPREEQYNSTYRVVSVLTVLHQDWLNGKEYKCKVSNKALPAPIEKTISKAKGQPREPQVYTLPPSRDELTKNQVSLTCLVKGFYPSDIAVEWESNGQPENNYKTTPPVLDSDGSFFLYSKLTVDKSRWQQGNVFSCSVMHEALHNHYTQKSLSLSPGK

SEQ ID NO: 399 - protein, 449 aa, synthetic construct
  REGION 1..449: note = Description of Artificial Sequence: Synthetic polypeptide
EVQLLESGGGLVQPGGSLRLSCAASGYTFTTYWITWVRQAPGKGLEWVSDIYPGSSISNYNEKFKSRFTISVDNSKNTLYLQMNSLRAEDTAVYYCAREDGYDAWFAYWGQGTLVTVSSASTKGPSVFPLAPSSKSTSGGTAALGCLVKDYFPEPVTVSWNSGALTSGVHTFPAVLQSSGLYSLSSVVTVPSSSLGTQTYICNVNHKPSNTKVDKKVEPKSCDKTHTCPPCPAPELLGGPSVFLFPPKPKDTLMISRTPEVTCVVVDVSHEDPEVKFNWYVDGVEVHNAKTKPREEQYNSTYRVVSVLTVLHQDWLNGKEYKCKVSNKALPAPIEKTISKAKGQPREPQVYTLPPSRDELTKNQVSLTCLVKGFYPSDIAVEWESNGQPENNYKTTPPVLDSDGSFFLYSKLTVDKSRWQQGNVFSCSVMHEALHNHYTQKSLSLSPGK

SEQ ID NO: 400 - DNA, 57 bp, synthetic construct; identical to SEQ ID NO: 203
  misc_feature 1..57: note = Description of Artificial Sequence: Synthetic oligonucleotide
  source 1..57: mol_type = other DNA

SEQ ID NO: 401 - DNA, 357 bp, synthetic construct
  misc_feature 1..357: note = Description of Artificial Sequence: Synthetic polynucleotide
  source 1..357: mol_type = other DNA
gaagtgcagctgctggaatctggcggcggactggtgcagcctggcggctctctgagactgtcttgtgccgcctccggctacaccttcaccacctactggatcacctgggtccgacaggctcccggcaagggactggaatgggtctccgacatctaccccggctcctccatctccaactacaacgagaagttcaagtcccggttcaccatctccgtggacaactccaagaacaccctgtacctccagatgaactccctgagagccgaggacaccgccgtgtactactgcgccagagaggacggctacgacgcttggtttgcttactggggccagggcaccctggtcaccgtgtcatct

SEQ ID NO: 402 - protein, 119 aa, synthetic construct
  REGION 1..119: note = Description of Artificial Sequence: Synthetic polypeptide
EVQLLESGGGLVQPGGSLRLSCAASGYTFTTYWITWVRQAPGKGLEWVSDIYPGSSISNYNEKFKSRFTISVDNSKNTLYLQMNSLRAEDTAVYYCAREDGYDAWFAYWGQGTLVTVSS

SEQ ID NO: 403 - DNA, 993 bp, synthetic construct; identical to SEQ ID NO: 340
  misc_feature 1..993: note = Description of Artificial Sequence: Synthetic polynucleotide
  source 1..993: mol_type = other DNA

SEQ ID NO: 404 - protein, 330 aa, synthetic construct [sequence omitted]

SEQ ID NO: 405 - DNA, 434 bp, synthetic construct
  misc_feature 1..434: note = Description of Artificial Sequence: Synthetic polynucleotide
  source 1..434: mol_type = other DNA
atgaagttgcctgttaggctgttggtgatgatgttctggattcctgcttccagcagtgatgttttgatgacccaaactccactctccctgcctgtcagtcttggagatcaagcctccatctcttgcagatctagtcagagcattttacatagtaatggaaacacctatttagaatggtacctgcagaaaccaggccagtctccaaagctcctgatttgcaaagtttccaaccgattttctggggtcccagacaggttcagtggcagtggatcagggacagatttcacactcaagatcagcagagtggaggctgaggatctgggagtttattactgctttcaaggttcacatgttccattcacgttcggctcggggacaaagttggaaataaaacgggctgatgctgcaccaactgtatccatcttcccaccttc

SEQ ID NO: 406 - DNA, 377 bp, synthetic construct
  misc_feature 1..377: note = Description of Artificial Sequence: Synthetic polynucleotide
  source 1..377: mol_type = other DNA
gatgttttgatgacccaaactccactctccctgcctgtcagtcttggagatcaagcctccatctcttgcagatctagtcagagcattttacatagtaatggaaacacctatttagaatggtacctgcagaaaccaggccagtctccaaagctcctgatttgcaaagtttccaaccgattttctggggtcccagacaggttcagtggcagtggatcagggacagatttcacactcaagatcagcagagtggaggctgaggatctgggagtttattactgctttcaaggttcacatgttccattcacgttcggctcggggacaaagttggaaataaaacgggctgatgctgcaccaactgtatccatcttcccaccttc

SEQ ID NO: 407 - protein, 145 aa, synthetic construct
  REGION 1..145: note = Description of Artificial Sequence: Synthetic polypeptide
MKLPVRLLVMMFWIPASSSDVLMTQTPLSLPVSLGDQASISCRSSQSILHSNGNTYLEWYLQKPGQSPKLLICKVSNRFSGVPDRFSGSGSGTDFTLKISRVEAEDLGVYYCFQGSHVPFTFGSGTKLEIKRADAAPTVSIFPPS

SEQ ID NO: 408 - protein, 126 aa, synthetic construct
  REGION 1..126: note = Description of Artificial Sequence: Synthetic polypeptide
DVLMTQTPLSLPVSLGDQASISCRSSQSILHSNGNTYLEWYLQKPGQSPKLLICKVSNRFSGVPDRFSGSGSGTDFTLKISRVEAEDLGVYYCFQGSHVPFTFGSGTKLEIKRADAAPTVSIFPPS

SEQ ID NO: 409 - DNA, 57 bp, synthetic construct
  misc_feature 1..57: note = Description of Artificial Sequence: Synthetic oligonucleotide
  source 1..57: mol_type = other DNA
atgaagttgcctgttaggctgttggtgatgatgttctggattcctgcttccagcagt

SEQ ID NO: 410 - DNA, 336 bp, synthetic construct
  misc_feature 1..336: note = Description of Artificial Sequence: Synthetic polynucleotide
  source 1..336: mol_type = other DNA
gatgttttgatgacccaaactccactctccctgcctgtcagtcttggagatcaagcctccatctcttgcagatctagtcagagcattttacatagtaatggaaacacctatttagaatggtacctgcagaaaccaggccagtctccaaagctcctgatttgcaaagtttccaaccgattttctggggtcccagacaggttcagtggcagtggatcagggacagatttcacactcaagatcagcagagtggaggctgaggatctgggagtttattactgctttcaaggttcacatgttccattcacgttcggctcggggacaaagttggaaataaaa

SEQ ID NO: 411 - protein, 112 aa, synthetic construct
  REGION 1..112: note = Description of Artificial Sequence: Synthetic polypeptide
DVLMTQTPLSLPVSLGDQASISCRSSQSILHSNGNTYLEWYLQKPGQSPKLLICKVSNRFSGVPDRFSGSGSGTDFTLKISRVEAEDLGVYYCFQGSHVPFTFGSGTKLEIK

SEQ ID NO: 412 - DNA, 41 bp, synthetic construct
  misc_feature 1..41: note = Description of Artificial Sequence: Synthetic oligonucleotide
  source 1..41: mol_type = other DNA
cgggctgatgctgcaccaactgtatccatcttcccaccttc

SEQ ID NO: 413 - protein, 15 aa, synthetic construct
  REGION 1..15: note = Description of Artificial Sequence: Synthetic peptide
KRADAAPTVSIFPPS

SEQ ID NO: 414 - DNA, 717 bp, synthetic construct
  misc_feature 1..717: note = Description of Artificial Sequence: Synthetic polynucleotide
  source 1..717: mol_type = other DNA
atgggctggtcctgcatcatcctgtttctggtggccaccgccaccggcgtgcacagcgacgtcgtgatgacacagtcccccctgtccctgcctgtgaccctgggacagcctgcctccatctcctgcagatcctcccagtccatcctgcactccaacggcaacacctacctggaatggttccagcagcggcctggccagtctcccagacggctgatctacaaggtgtccaaccggttctccggcgtgcccgacagattctccggctctggctctggcaccgacttcaccctgaagatctcccgggtggaagccgaggacgtgggcgtgtactactgttttcaaggctcccacgtgcccttcaccttcggccagggcaccaagctggaaatcaaacgaactgtggctgcaccatctgtcttcatcttcccgccatctgatgagcagttgaaatctggaactgcctctgttgtgtgcctgctgaataacttctatcccagagaggccaaagtacagtggaaggtggataacgccctccaatcgggtaactcccaggagagtgtcacagagcaggacagcaaggacagcacctacagcctcagcagcaccctgacgctgagcaaagcagactacgagaaacacaaagtctacgcctgcgaagtcacccatcagggcctgagctcgcccgtcacaaagagcttcaacaggggagagtgttga

SEQ ID NO: 415 - DNA, 660 bp, synthetic construct
  misc_feature 1..660: note = Description of Artificial Sequence: Synthetic polynucleotide
  source 1..660: mol_type = other DNA
gacgtcgtgatgacacagtcccccctgtccctgcctgtgaccctgggacagcctgcctccatctcctgcagatcctcccagtccatcctgcactccaacggcaacacctacctggaatggttccagcagcggcctggccagtctcccagacggctgatctacaaggtgtccaaccggttctccggcgtgcccgacagattctccggctctggctctggcaccgacttcaccctgaagatctcccgggtggaagccgaggacgtgggcgtgtactactgttttcaaggctcccacgtgcccttcaccttcggccagggcaccaagctggaaatcaaacgaactgtggctgcaccatctgtcttcatcttcccgccatctgatgagcagttgaaatctggaactgcctctgttgtgtgcctgctgaataacttctatcccagagaggccaaagtacagtggaaggtggataacgccctccaatcgggtaactcccaggagagtgtcacagagcaggacagcaaggacagcacctacagcctcagcagcaccctgacgctgagcaaagcagactacgagaaacacaaagtctacgcctgcgaagtcacccatcagggcctgagctcgcccgtcacaaagagcttcaacaggggagagtgttga

SEQ ID NO: 416 - protein, 238 aa, synthetic construct
  REGION 1..238: note = Description of Artificial Sequence: Synthetic polypeptide
MGWSCIILFLVATATGVHSDVVMTQSPLSLPVTLGQPASISCRSSQSILHSNGNTYLEWFQQRPGQSPRRLIYKVSNRFSGVPDRFSGSGSGTDFTLKISRVEAEDVGVYYCFQGSHVPFTFGQGTKLEIKRTVAAPSVFIFPPSDEQLKSGTASVVCLLNNFYPREAKVQWKVDNALQSGNSQESVTEQDSKDSTYSLSSTLTLSKADYEKHKVYACEVTHQGLSSPVTKSFNRGEC

SEQ ID NO: 417 - protein, 219 aa, synthetic construct
  REGION 1..219: note = Description of Artificial Sequence: Synthetic polypeptide
DVVMTQSPLSLPVTLGQPASISCRSSQSILHSNGNTYLEWFQQRPGQSPRRLIYKVSNRFSGVPDRFSGSGSGTDFTLKISRVEAEDVGVYYCFQGSHVPFTFGQGTKLEIKRTVAAPSVFIFPPSDEQLKSGTASVVCLLNNFYPREAKVQWKVDNALQSGNSQESVTEQDSKDSTYSLSSTLTLSKADYEKHKVYACEVTHQGLSSPVTKSFNRGEC

SEQ ID NO: 418 - DNA, 57 bp, synthetic construct; identical to SEQ ID NO: 203
  misc_feature 1..57: note = Description of Artificial Sequence: Synthetic oligonucleotide
  source 1..57: mol_type = other DNA

SEQ ID NO: 419 - DNA, 336 bp, synthetic construct
  misc_feature 1..336: note = Description of Artificial Sequence: Synthetic polynucleotide
  source 1..336: mol_type = other DNA
gacgtcgtgatgacacagtcccccctgtccctgcctgtgaccctgggacagcctgcctccatctcctgcagatcctcccagtccatcctgcactccaacggcaacacctacctggaatggttccagcagcggcctggccagtctcccagacggctgatctacaaggtgtccaaccggttctccggcgtgcccgacagattctccggctctggctctggcaccgacttcaccctgaagatctcccgggtggaagccgaggacgtgggcgtgtactactgttttcaaggctcccacgtgcccttcaccttcggccagggcaccaagctggaaatcaaa

SEQ ID NO: 420 - protein, 112 aa, synthetic construct
  REGION 1..112: note = Description of Artificial Sequence: Synthetic polypeptide
DVVMTQSPLSLPVTLGQPASISCRSSQSILHSNGNTYLEWFQQRPGQSPRRLIYKVSNRFSGVPDRFSGSGSGTDFTLKISRVEAEDVGVYYCFQGSHVPFTFGQGTKLEIK

SEQ ID NO: 421 - DNA, 321 bp, synthetic construct
  misc_feature 1..321: note = Description of Artificial Sequence: Synthetic polynucleotide
  source 1..321: mol_type = other DNA
cgaactgtggctgcaccatctgtcttcatcttcccgccatctgatgagcagttgaaatctggaactgcctctgttgtgtgcctgctgaataacttctatcccagagaggccaaagtacagtggaaggtggataacgccctccaatcgggtaactcccaggagagtgtcacagagcaggacagcaaggacagcacctacagcctcagcagcaccctgacgctgagcaaagcagactacgagaaacacaaagtctacgcctgcgaagtcacccatcagggcctgagctcgcccgtcacaaagagcttcaacaggggagagtgt

SEQ ID NO: 422 - protein, 107 aa, synthetic construct [sequence omitted]

SEQ ID NO: 423 - DNA, 717 bp, synthetic construct
  misc_feature 1..717: note = Description of Artificial Sequence: Synthetic polynucleotide
  source 1..717: mol_type = other DNA
atgggctggtcctgcatcatcctgtttctggtggccaccgccaccggcgtgcacagcgacgtcgtgatgacacagtcccccctgtccctgcctgtgaccctgggacagcctgcctccatctcctgcagatcctcccagtccatcctgcactccaacggcaacacctacctggaatggtatcagcagcggcctggccagtctcccagactgctgatctgcaaggtgtccaaccggttctccggcgtgcccgacagattctccggctctggctctggcaccgacttcaccctgaagatctcccgggtggaagccgaggacgtgggcgtgtactactgttttcaaggctcccacgtgcccttcaccttcggccagggcaccaagctggaaatcaaacgaactgtggctgcaccatctgtcttcatcttcccgccatctgatgagcagttgaaatctggaactgcctctgttgtgtgcctgctgaataacttctatcccagagaggccaaagtacagtggaaggtggataacgccctccaatcgggtaactcccaggagagtgtcacagagcaggacagcaaggacagcacctacagcctcagcagcaccctgacgctgagcaaagcagactacgagaaacacaaagtctacgcctgcgaagtcacccatcagggcctgagctcgcccgtcacaaagagcttcaacaggggagagtgttga

SEQ ID NO: 424 - DNA, 660 bp, synthetic construct
  misc_feature 1..660: note = Description of Artificial Sequence: Synthetic polynucleotide
  source 1..660: mol_type = other DNA
gacgtcgtgatgacacagtcccccctgtccctgcctgtgaccctgggacagcctgcctccatctcctgcagatcctcccagtccatcctgcactccaacggcaacacctacctggaatggtatcagcagcggcctggccagtctcccagactgctgatctgcaaggtgtccaaccggttctccggcgtgcccgacagattctccggctctggctctggcaccgacttcaccctgaagatctcccgggtggaagccgaggacgtgggcgtgtactactgttttcaaggctcccacgtgcccttcaccttcggccagggcaccaagctggaaatcaaacgaactgtggctgcaccatctgtcttcatcttcccgccatctgatgagcagttgaaatctggaactgcctctgttgtgtgcctgctgaataacttctatcccagagaggccaaagtacagtggaaggtggataacgccctccaatcgggtaactcccaggagagtgtcacagagcaggacagcaaggacagcacctacagcctcagcagcaccctgacgctgagcaaagcagactacgagaaacacaaagtctacgcctgcgaagtcacccatcagggcctgagctcgcccgtcacaaagagcttcaacaggggagagtgttga

SEQ ID NO: 425 - protein, 238 aa, synthetic construct
  REGION 1..238: note = Description of Artificial Sequence: Synthetic polypeptide
MGWSCIILFLVATATGVHSDVVMTQSPLSLPVTLGQPASISCRSSQSILHSNGNTYLEWYQQRPGQSPRLLICKVSNRFSGVPDRFSGSGSGTDFTLKISRVEAEDVGVYYCFQGSHVPFTFGQGTKLEIKRTVAAPSVFIFPPSDEQLKSGTASVVCLLNNFYPREAKVQWKVDNALQSGNSQESVTEQDSKDSTYSLSSTLTLSKADYEKHKVYACEVTHQGLSSPVTKSFNRGEC

SEQ ID NO: 426 - protein, 219 aa, synthetic construct
  REGION 1..219: note = Description of Artificial Sequence: Synthetic polypeptide
DVVMTQSPLSLPVTLGQPASISCRSSQSILHSNGNTYLEWYQQRPGQSPRLLICKVSNRFSGVPDRFSGSGSGTDFTLKISRVEAEDVGVYYCFQGSHVPFTFGQGTKLEIKRTVAAPSVFIFPPSDEQLKSGTASVVCLLNNFYPREAKVQWKVDNALQSGNSQESVTEQDSKDSTYSLSSTLTLSKADYEKHKVYACEVTHQGLSSPVTKSFNRGEC

SEQ ID NO: 427 - DNA, 57 bp, synthetic construct; identical to SEQ ID NO: 203
  misc_feature 1..57: note = Description of Artificial Sequence: Synthetic oligonucleotide
  source 1..57: mol_type = other DNA

SEQ ID NO: 428 - DNA, 336 bp, synthetic construct
  misc_feature 1..336: note = Description of Artificial Sequence: Synthetic polynucleotide
  source 1..336: mol_type = other DNA
gacgtcgtgatgacacagtcccccctgtccctgcctgtgaccctgggacagcctgcctccatctcctgcagatcctcccagtccatcctgcactccaacggcaacacctacctggaatggtatcagcagcggcctggccagtctcccagactgctgatctgcaaggtgtccaaccggttctccggcgtgcccgacagattctccggctctggctctggcaccgacttcaccctgaagatctcccgggtggaagccgaggacgtgggcgtgtactactgttttcaaggctcccacgtgcccttcaccttcggccagggcaccaagctggaaatcaaa

SEQ ID NO: 429 - protein, 112 aa, synthetic construct
  REGION 1..112: note = Description of Artificial Sequence: Synthetic polypeptide
DVVMTQSPLSLPVTLGQPASISCRSSQSILHSNGNTYLEWYQQRPGQSPRLLICKVSNRFSGVPDRFSGSGSGTDFTLKISRVEAEDVGVYYCFQGSHVPFTFGQGTKLEIK

SEQ ID NO: 430 - DNA, 321 bp, synthetic construct; identical to SEQ ID NO: 421
  misc_feature 1..321: note = Description of Artificial Sequence: Synthetic polynucleotide
  source 1..321: mol_type = other DNA

SEQ ID NO: 431 - protein, 107 aa, synthetic construct [sequence omitted]

SEQ ID NO: 432 - DNA, 717 bp, synthetic construct
  misc_feature 1..717: note = Description of Artificial Sequence: Synthetic polynucleotide
  source 1..717: mol_type = other DNA
atgggctggtcctgcatcatcctgtttctggtggccaccgccaccggcgtgcacagcgacgtcgtgatgacacagtcccccctgtccctgcctgtgaccctgggacagcctgcctccatctcctgcagatcctcccagtccatcctgcactccaacggcaacacctacctggaatggttccagcagcggcctggccagtctccccgtagactgatctgcaaggtgtccaaccggttctccggcgtgcccgacagattctccggctctggctctggcaccgacttcaccctgaagatctcccgggtggaagccgaggacgtgggcgtgtactactgttttcaaggctcccacgtgcccttcaccttcggccagggcaccaagctggaaatcaaacgaactgtggctgcaccatctgtcttcatcttcccgccatctgatgagcagttgaaatctggaactgcctctgttgtgtgcctgctgaataacttctatcccagagaggccaaagtacagtggaaggtggataacgccctccaatcgggtaactcccaggagagtgtcacagagcaggacagcaaggacagcacctacagcctcagcagcaccctgacgctgagcaaagcagactacgagaaacacaaagtctacgcctgcgaagtcacccatcagggcctgagctcgcccgtcacaaagagcttcaacaggggagagtgttga

SEQ ID NO: 433 - DNA, 660 bp, synthetic construct
  misc_feature 1..660: note = Description of Artificial Sequence: Synthetic polynucleotide
  source 1..660: mol_type = other DNA
gacgtcgtgatgacacagtcccccctgtccctgcctgtgaccctgggacagcctgcctccatctcctgcagatcctcccagtccatcctgcactccaacggcaacacctacctggaatggttccagcagcggcctggccagtctccccgtagactgatctgcaaggtgtccaaccggttctccggcgtgcccgacagattctccggctctggctctggcaccgacttcaccctgaagatctcccgggtggaagccgaggacgtgggcgtgtactactgttttcaaggctcccacgtgcccttcaccttcggccagggcaccaagctggaaatcaaacgaactgtggctgcaccatctgtcttcatcttcccgccatctgatgagcagttgaaatctggaactgcctctgttgtgtgcctgctgaataacttctatcccagagaggccaaagtacagtggaaggtggataacgccctccaatcgggtaactcccaggagagtgtcacagagcaggacagcaaggacagcacctacagcctcagcagcaccctgacgctgagcaaagcagactacgagaaacacaaagtctacgcctgcgaagtcacccatcagggcctgagctcgcccgtcacaaagagcttcaacaggggagagtgttga

SEQ ID NO: 434 - protein, 238 aa, synthetic construct
  REGION 1..238: note = Description of Artificial Sequence: Synthetic polypeptide
MGWSCIILFLVATATGVHSDVVMTQSPLSLPVTLGQPASISCRSSQSILHSNGNTYLEWFQQRPGQSPRRLICKVSNRFSGVPDRFSGSGSGTDFTLKISRVEAEDVGVYYCFQGSHVPFTFGQGTKLEIKRTVAAPSVFIFPPSDEQLKSGTASVVCLLNNFYPREAKVQWKVDNALQSGNSQESVTEQDSKDSTYSLSSTLTLSKADYEKHKVYACEVTHQGLSSPVTKSFNRGEC

SEQ ID NO: 435 - protein, 219 aa, synthetic construct
  REGION 1..219: note = Description of Artificial Sequence: Synthetic polypeptide
DVVMTQSPLSLPVTLGQPASISCRSSQSILHSNGNTYLEWFQQRPGQSPRRLICKVSNRFSGVPDRFSGSGSGTDFTLKISRVEAEDVGVYYCFQGSHVPFTFGQGTKLEIKRTVAAPSVFIFPPSDEQLKSGTASVVCLLNNFYPREAKVQWKVDNALQSGNSQESVTEQDSKDSTYSLSSTLTLSKADYEKHKVYACEVTHQGLSSPVTKSFNRGEC

SEQ ID NO: 436 - DNA, 57 bp, synthetic construct; identical to SEQ ID NO: 203
  misc_feature 1..57: note = Description of Artificial Sequence: Synthetic oligonucleotide
  source 1..57: mol_type = other DNA

SEQ ID NO: 437 - DNA, 336 bp, synthetic construct
  misc_feature 1..336: note = Description of Artificial Sequence: Synthetic polynucleotide
  source 1..336: mol_type = other DNA
gacgtcgtgatgacacagtcccccctgtccctgcctgtgaccctgggacagcctgcctccatctcctgcagatcctcccagtccatcctgcactccaacggcaacacctacctggaatggttccagcagcggcctggccagtctccccgtagactgatctgcaaggtgtccaaccggttctccggcgtgcccgacagattctccggctctggctctggcaccgacttcaccctgaagatctcccgggtggaagccgaggacgtgggcgtgtactactgttttcaaggctcccacgtgcccttcaccttcggccagggcaccaagctggaaatcaaa

SEQ ID NO: 438 - protein, 112 aa, synthetic construct
  REGION 1..112: note = Description of Artificial Sequence: Synthetic polypeptide
DVVMTQSPLSLPVTLGQPASISCRSSQSILHSNGNTYLEWFQQRPGQSPRRLICKVSNRFSGVPDRFSGSGSGTDFTLKISRVEAEDVGVYYCFQGSHVPFTFGQGTKLEIK

SEQ ID NO: 439 - DNA, 321 bp, synthetic construct; identical to SEQ ID NO: 421
  misc_feature 1..321: note = Description of Artificial Sequence: Synthetic polynucleotide
  source 1..321: mol_type = other DNA

SEQ ID NO: 440 - protein, 107 aa, synthetic construct [sequence omitted]

SEQ ID NO: 441 - DNA, 717 bp, synthetic construct
  misc_feature 1..717: note = Description of Artificial Sequence: Synthetic polynucleotide
  source 1..717: mol_type = other DNA
atgggctggtcctgcatcatcctgtttctggtggccaccgccaccggcgtgcacagcgacgtcgtgatgacacagtcccccctgtccctgcctgtgaccctgggacagcctgcctccatctcctgcagatcctcccagtccatcctgcactccaacggcaacacctacctggaatggtatcagcagcggcctggccagtcccccagacggctgatctgcaaggtgtccaaccggttctctggcgtgcccgacagattctccggctctggctctggcaccgacttcaccctgaagatctcccgggtggaagccgaggacgtgggcgtgtactactgttttcaaggctcccacgtgcccttcaccttcggccagggcaccaagctggaaatcaaacgaactgtggctgcaccatctgtcttcatcttcccgccatctgatgagcagttgaaatctggaactgcctctgttgtgtgcctgctgaataacttctatcccagagaggccaaagtacagtggaaggtggataacgccctccaatcgggtaactcccaggagagtgtcacagagcaggacagcaaggacagcacctacagcctcagcagcaccctgacgctgagcaaagcagactacgagaaacacaaagtctacgcctgcgaagtcacccatcagggcctgagctcgcccgtcacaaagagcttcaacaggggagagtgttga

SEQ ID NO: 442 - DNA, 660 bp, synthetic construct
  misc_feature 1..660: note = Description of Artificial Sequence: Synthetic polynucleotide
  source 1..660: mol_type = other DNA
gacgtcgtgatgacacagtcccccctgtccctgcctgtgaccctgggacagcctgcctccatctcctgcagatcctcccagtccatcctgcactccaacggcaacacctacctggaatggtatcagcagcggcctggccagtcccccagacggctgatctgcaaggtgtccaaccggttctctggcgtgcccgacagattctccggctctggctctggcaccgacttcaccctgaagatctcccgggtggaagccgaggacgtgggcgtgtactactgttttcaaggctcccacgtgcccttcaccttcggccagggcaccaagctggaaatcaaacgaactgtggctgcaccatctgtcttcatcttcccgccatctgatgagcagttgaaatctggaactgcctctgttgtgtgcctgctgaataacttctatcccagagaggccaaagtacagtggaaggtggataacgccctccaatcgggtaactcccaggagagtgtcacagagcaggacagcaaggacagcacctacagcctcagcagcaccctgacgctgagcaaagcagactacgagaaacacaaagtctacgcctgcgaagtcacccatcagggcctgagctcgcccgtcacaaagagcttcaacaggggagagtgttga

SEQ ID NO: 443 - protein, 238 aa, synthetic construct
  REGION 1..238: note = Description of Artificial Sequence: Synthetic polypeptide
MGWSCIILFLVATATGVHSDVVMTQSPLSLPVTLGQPASISCRSSQSILHSNGNTYLEWYQQRPGQSPRRLICKVSNRFSGVPDRFSGSGSGTDFTLKISRVEAEDVGVYYCFQGSHVPFTFGQGTKLEIKRTVAAPSVFIFPPSDEQLKSGTASVVCLLNNFYPREAKVQWKVDNALQSGNSQESVTEQDSKDSTYSLSSTLTLSKADYEKHKVYACEVTHQGLSSPVTKSFNRGEC

SEQ ID NO: 444 - protein, 219 aa, synthetic construct
  REGION 1..219: note = Description of Artificial Sequence: Synthetic polypeptide
DVVMTQSPLSLPVTLGQPASISCRSSQSILHSNGNTYLEWYQQRPGQSPRRLICKVSNRFSGVPDRFSGSGSGTDFTLKISRVEAEDVGVYYCFQGSHVPFTFGQGTKLEIKRTVAAPSVFIFPPSDEQLKSGTASVVCLLNNFYPREAKVQWKVDNALQSGNSQESVTEQDSKDSTYSLSSTLTLSKADYEKHKVYACEVTHQGLSSPVTKSFNRGEC

SEQ ID NO: 445 - DNA, 57 bp, synthetic construct; identical to SEQ ID NO: 203
  misc_feature 1..57: note = Description of Artificial Sequence: Synthetic oligonucleotide
  source 1..57: mol_type = other DNA

SEQ ID NO: 446 - DNA, 336 bp, synthetic construct
  misc_feature 1..336: note = Description of Artificial Sequence: Synthetic polynucleotide
  source 1..336: mol_type = other DNA
gacgtcgtgatgacacagtcccccctgtccctgcctgtgaccctgggacagcctgcctccatctcctgcagatcctcccagtccatcctgcactccaacggcaacacctacctggaatggtatcagcagcggcctggccagtcccccagacggctgatctgcaaggtgtccaaccggttctctggcgtgcccgacagattctccggctctggctctggcaccgacttcaccctgaagatctcccgggtggaagccgaggacgtgggcgtgtactactgttttcaaggctcccacgtgcccttcaccttcggccagggcaccaagctggaaatcaaa

SEQ ID NO: 447 - protein, 112 aa, synthetic construct
  REGION 1..112: note = Description of Artificial Sequence: Synthetic polypeptide
DVVMTQSPLSLPVTLGQPASISCRSSQSILHSNGNTYLEWYQQRPGQSPRRLICKVSNRFSGVPDRFSGSGSGTDFTLKISRVEAEDVGVYYCFQGSHVPFTFGQGTKLEIK

SEQ ID NO: 448 - DNA, 321 bp, synthetic construct; identical to SEQ ID NO: 421
  misc_feature 1..321: note = Description of Artificial Sequence: Synthetic polynucleotide
  source 1..321: mol_type = other DNA

SEQ ID NO: 449 - protein, 107 aa, synthetic construct [sequence omitted]

SEQ ID NO: 450 - DNA, 717 bp, synthetic construct
  misc_feature 1..717: note = Description of Artificial Sequence: Synthetic polynucleotide
  source 1..717: mol_type = other DNA
atgggctggtcctgcatcatcctgtttctggtggccaccgccaccggcgtgcacagcgacgtcgtgatgacacagtcccccctgtccctgcctgtgaccctgggacagcctgcctccatctcctgcagatcctcccagtccatcctgcactccaacggcaacacctacctggaatggttccagcagcggcctggccagtcccccagactgctgatctgcaaggtgtccaaccggttctccggcgtgcccgacagattctccggctctggctctggcaccgacttcaccctgaagatctcccgggtggaagccgaggacgtgggcgtgtactactgttttcaaggctcccacgtgcccttcaccttcggccagggcaccaagctggaaatcaaacgaactgtggctgcaccatctgtcttcatcttcccgccatctgatgagcagttgaaatctggaactgcctctgttgtgtgcctgctgaataacttctatcccagagaggccaaagtacagtggaaggtggataacgccctccaatcgggtaactcccaggagagtgtcacagagcaggacagcaaggacagcacctacagcctcagcagcaccctgacgctgagcaaagcagactacgagaaacacaaagtctacgcctgcgaagtcacccatcagggcctgagctcgcccgtcacaaagagcttcaacaggggagagtgttga

SEQ ID NO: 451 - DNA, 660 bp, synthetic construct
  misc_feature 1..660: note = Description of Artificial Sequence: Synthetic polynucleotide
  source 1..660: mol_type = other DNA
gacgtcgtgatgacacagtcccccctgtccctgcctgtgaccctgggacagcctgcctccatctcctgcagatcctcccagtccatcctgcactccaacggcaacacctacctggaatggttccagcagcggcctggccagtcccccagactgctgatctgcaaggtgtccaaccggttctccggcgtgcccgacagattctccggctctggctctggcaccgacttcaccctgaagatctcccgggtggaagccgaggacgtgggcgtgtactactgttttcaaggctcccacgtgcccttcaccttcggccagggcaccaagctggaaatcaaacgaactgtggctgcaccatctgtcttcatcttcccgccatctgatgagcagttgaaatctggaactgcctctgttgtgtgcctgctgaataacttctatcccagagaggccaaagtacagtggaaggtggataacgccctccaatcgggtaactcccaggagagtgtcacagagcaggacagcaaggacagcacctacagcctcagcagcaccctgacgctgagcaaagcagactacgagaaacacaaagtctacgcctgcgaagtcacccatcagggcctgagctcgcccgtcacaaagagcttcaacaggggagagtgttga

SEQ ID NO: 452 - protein, 238 aa, synthetic construct
  REGION 1..238: note = Description of Artificial Sequence: Synthetic polypeptide
MGWSCIILFLVATATGVHSDVVMTQSPLSLPVTLGQPASISCRSSQSILHSNGNTYLEWFQQRPGQSPRLLICKVSNRFSGVPDRFSGSGSGTDFTLKISRVEAEDVGVYYCFQGSHVPFTFGQGTKLEIKRTVAAPSVFIFPPSDEQLKSGTASVVCLLNNFYPREAKVQWKVDNALQSGNSQESVTEQDSKDSTYSLSSTLTLSKADYEKHKVYACEVTHQGLSSPVTKSFNRGEC

SEQ ID NO: 453 - protein, 219 aa, synthetic construct
  REGION 1..219: note = Description of Artificial Sequence: Synthetic polypeptide
DVVMTQSPLSLPVTLGQPASISCRSSQSILHSNGNTYLEWFQQRPGQSPRLLICKVSNRFSGVPDRFSGSGSGTDFTLKISRVEAEDVGVYYCFQGSHVPFTFGQGTKLEIKRTVAAPSVFIFPPSDEQLKSGTASVVCLLNNFYPREAKVQWKVDNALQSGNSQESVTEQDSKDSTYSLSSTLTLSKADYEKHKVYACEVTHQGLSSPVTKSFNRGEC

SEQ ID NO: 454 - DNA, 57 bp, synthetic construct; identical to SEQ ID NO: 203
  misc_feature 1..57: note = Description of Artificial Sequence: Synthetic oligonucleotide
  source 1..57: mol_type = other DNA

SEQ ID NO: 455 - DNA, 336 bp, synthetic construct
  misc_feature 1..336: note = Description of Artificial Sequence: Synthetic polynucleotide
  source 1..336: mol_type = other DNA
gacgtcgtgatgacacagtcccccctgtccctgcctgtgaccctgggacagcctgcctccatctcctgcagatcctcccagtccatcctgcactccaacggcaacacctacctggaatggttccagcagcggcctggccagtcccccagactgctgatctgcaaggtgtccaaccggttctccggcgtgcccgacagattctccggctctggctctggcaccgacttcaccctgaagatctcccgggtggaagccgaggacgtgggcgtgtactactgttttcaaggctcccacgtgcccttcaccttcggccagggcaccaagctggaaatcaaa

SEQ ID NO: 456 - protein, 112 aa, synthetic construct
  REGION 1..112: note = Description of Artificial Sequence: Synthetic polypeptide
DVVMTQSPLSLPVTLGQPASISCRSSQSILHSNGNTYLEWFQQRPGQSPRLLICKVSNRFSGVPDRFSGSGSGTDFTLKISRVEAEDVGVYYCFQGSHVPFTFGQGTKLEIK

SEQ ID NO: 457 - DNA, 321 bp, synthetic construct; identical to SEQ ID NO: 421
  misc_feature 1..321: note = Description of Artificial Sequence: Synthetic polynucleotide
  source 1..321: mol_type = other DNA

SEQ ID NO: 458 - protein, 107 aa, synthetic construct [sequence omitted]

SEQ ID NO: 459 - DNA, 717 bp, synthetic construct
  misc_feature 1..717: note = Description of Artificial Sequence: Synthetic polynucleotide
  source 1..717: mol_type = other DNA
atgggctggtcctgcatcatcctgtttctggtggccaccgccaccggcgtgcacagcgacgtcgtgatgacacagtcccccctgtccctgcctgtgaccctgggacagcctgcctccatctcctgcagatcctcccagtccatcctgcactccaacggcaacacctacctggaatggtatcagcagcggcctggccagtctccccggctgctgatttccaaggtgtccaaccggttctccggcgtgcccgacagattctccggctctggctctggcaccgacttcaccctgaagatctcccgggtggaagccgaggacgtgggcgtgtactactgttttcaaggctcccacgtgcccttcaccttcggccagggcaccaagctggaaatcaaacgaactgtggctgcaccatctgtcttcatcttcccgccatctgatgagcagttgaaatctggaactgcctctgttgtgtgcctgctgaataacttctatcccagagaggccaaagtacagtggaaggtggataacgccctccaatcgggtaactcccaggagagtgtcacagagcaggacagcaaggacagcacctacagcctcagcagcaccctgacgctgagcaaagcagactacgagaaacacaaagtctacgcctgcgaagtcacccatcagggcctgagctcgcccgtcacaaagagcttcaacaggggagagtgttga

SEQ ID NO: 460 - DNA, 660 bp, synthetic construct
  misc_feature 1..660: note = Description of Artificial Sequence: Synthetic polynucleotide
  source 1..660: mol_type = other DNA
gacgtcgtgatgacacagtcccccctgtccctgcctgtgaccctgggacagcctgcctccatctcctgcagatcctcccagtccatcctgcactccaacggcaacacctacctggaatggtatcagcagcggcctggccagtctccccggctgctgatttccaaggtgtccaaccggttctccggcgtgcccgacagattctccggctctggctctggcaccgacttcaccctgaagatctcccgggtggaagccgaggacgtgggcgtgtactactgttttcaaggctcccacgtgcccttcaccttcggccagggcaccaagctggaaatcaaacgaactgtggctgcaccatctgtcttcatcttcccgccatctgatgagcagttgaaatctggaactgcctctgttgtgtgcctgctgaataacttctatcccagagaggccaaagtacagtggaaggtggataacgccctccaatcgggtaactcccaggagagtgtcacagagcaggacagcaaggacagcacctacagcctcagcagcaccctgacgctgagcaaagcagactacgagaaacacaaagtctacgcctgcgaagtcacccatcagggcctgagctcgcccgtcacaaagagcttcaacaggggagagtgttga

SEQ ID NO: 461 - protein, 238 aa, synthetic construct
  REGION 1..238: note = Description of Artificial Sequence: Synthetic polypeptide
MGWSCIILFLVATATGVHSDVVMTQSPLSLPVTLGQPASISCRSSQSILHSNGNTYLEWYQQRPGQSPRLLISKVSNRFSGVPDRFSGSGSGTDFTLKISRVEAEDVGVYYCFQGSHVPFTFGQGTKLEIKRTVAAPSVFIFPPSDEQLKSGTASVVCLLNNFYPREAKVQWKVDNALQSGNSQESVTEQDSKDSTYSLSSTLTLSKADYEKHKVYACEVTHQGLSSPVTKSFNRGEC

SEQ ID NO: 462 - protein, 219 aa, synthetic construct
  REGION 1..219: note = Description of Artificial Sequence: Synthetic polypeptide
DVVMTQSPLSLPVTLGQPASISCRSSQSILHSNGNTYLEWYQQRPGQSPRLLISKVSNRFSGVPDRFSGSGSGTDFTLKISRVEAEDVGVYYCFQGSHVPFTFGQGTKLEIKRTVAAPSVFIFPPSDEQLKSGTASVVCLLNNFYPREAKVQWKVDNALQSGNSQESVTEQDSKDSTYSLSSTLTLSKADYEKHKVYACEVTHQGLSSPVTKSFNRGEC

SEQ ID NO: 463 - DNA, 57 bp, synthetic construct; identical to SEQ ID NO: 203
  misc_feature 1..57: note = Description of Artificial Sequence: Synthetic oligonucleotide
  source 1..57: mol_type = other DNA

SEQ ID NO: 464 - DNA, 336 bp, synthetic construct
  misc_feature 1..336: note = Description of Artificial Sequence: Synthetic polynucleotide
  source 1..336: mol_type = other DNA
gacgtcgtgatgacacagtcccccctgtccctgcctgtgaccctgggacagcctgcctccatctcctgcagatcctcccagtccatcctgcactccaacggcaacacctacctggaatggtatcagcagcggcctggccagtctccccggctgctgatttccaaggtgtccaaccggttctccggcgtgcccgacagattctccggctctggctctggcaccgacttcaccctgaagatctcccgggtggaagccgaggacgtgggcgtgtactactgttttcaaggctcccacgtgcccttcaccttcggccagggcaccaagctggaaatcaaa

SEQ ID NO: 465 - protein, 112 aa, synthetic construct
  REGION 1..112: note = Description of Artificial Sequence: Synthetic polypeptide
DVVMTQSPLSLPVTLGQPASISCRSSQSILHSNGNTYLEWYQQRPGQSPRLLISKVSNRFSGVPDRFSGSGSGTDFTLKISRVEAEDVGVYYCFQGSHVPFTFGQGTKLEIK

SEQ ID NO: 466 - DNA, 321 bp, synthetic construct; identical to SEQ ID NO: 421
  misc_feature 1..321: note = Description of Artificial Sequence: Synthetic polynucleotide
  source 1..321: mol_type = other DNA

SEQ ID NO: 467 - protein, 107 aa, synthetic construct [sequence omitted]

SEQ ID NO: 468 - DNA, 717 bp, synthetic construct
  misc_feature 1..717: note = Description of Artificial Sequence: Synthetic polynucleotide
  source 1..717: mol_type = other DNA
atgggctggtcctgcatcatcctgtttctggtggccaccgccaccggcgtgcacagcgacgtcgtgatgacacagtcccccctgtccctgcctgtgaccctgggacagcctgcctccatctcctgcagatcctcccagtccatcctgcactccaacggcaacacctacctggaatggttccagcagcggcctggccagtctcccagacggctgatctccaaggtgtccaaccggttctccggcgtgcccgacagattctccggctctggctctggcaccgacttcaccctgaagatctcccgggtggaagccgaggacgtgggcgtgtactactgttttcaaggctcccacgtgcccttcaccttcggccagggcaccaagctggaaatcaaacgaactgtggctgcaccatctgtcttcatcttcccgccatctgatgagcagttgaaatctggaactgcctctgttgtgtgcctgctgaataacttctatcccagagaggccaaagtacagtggaaggtggataacgccctccaatcgggtaactcccaggagagtgtcacagagcaggacagcaaggacagcacctacagcctcagcagcaccctgacgctgagcaaagcagactacgagaaacacaaagtctacgcctgcgaagtcacccatcagggcctgagctcgcccgtcacaaagagcttcaacaggggagagtgttga

SEQ ID NO: 469 - DNA, 660 bp, synthetic construct
  misc_feature 1..660: note = Description of Artificial Sequence: Synthetic polynucleotide
  source 1..660: mol_type = other DNA
gacgtcgtgatgacacagtcccccctgtccctgcctgtgaccctgggacagcctgcctccatctcctgcagatcctcccagtccatcctgcactccaacggcaacacctacctggaatggttccagcagcggcctggccagtctcccagacggctgatctccaaggtgtccaaccggttctccggcgtgcccgacagattctccggctctggctctggcaccgacttcaccctgaagatctcccgggtggaagccgaggacgtgggcgtgtactactgttttcaaggctcccacgtgcccttcaccttcggccagggcaccaagctggaaatcaaacgaactgtggctgcaccatctgtcttcatcttcccgccatctgatgagcagttgaaatctggaactgcctctgttgtgtgcctgctgaataacttctatcccagagaggccaaagtacagtggaaggtggataacgccctccaatcgggtaactcccaggagagtgtcacagagcaggacagcaaggacagcacctacagcctcagcagcaccctgacgctgagcaaagcagactacgagaaacacaaagtctacgcctgcgaagtcacccatcagggcctgagctcgcccgtcacaaagagcttcaacaggggagagtgttga

SEQ ID NO: 470 - protein, 238 aa, synthetic construct
  REGION 1..238: note = Description of Artificial Sequence: Synthetic polypeptide
MGWSCIILFLVATATGVHSDVVMTQSPLSLPVTLGQPASISCRSSQSILHSNGNTYLEWFQQRPGQSPRRLISKVSNRFSGVPDRFSGSGSGTDFTLKISRVEAEDVGVYYCFQGSHVPFTFGQGTKLEIKRTVAAPSVFIFPPSDEQLKSGTASVVCLLNNFYPREAKVQWKVDNALQSGNSQESVTEQDSKDSTYSLSSTLTLSKADYEKHKVYACEVTHQGLSSPVTKSFNRGEC

SEQ ID NO: 471 - protein, 219 aa, synthetic construct
  REGION 1..219: note = Description of Artificial Sequence: Synthetic polypeptide
DVVMTQSPLSLPVTLGQPASISCRSSQSILHSNGNTYLEWFQQRPGQSPRRLISKVSNRFSGVPDRFSGSGSGTDFTLKISRVEAEDVGVYYCFQGSHVPFTFGQGTKLEIKRTVAAPSVFIFPPSDEQLKSGTASVVCLLNNFYPREAKVQWKVDNALQSGNSQESVTEQDSKDSTYSLSSTLTLSKADYEKHKVYACEVTHQGLSSPVTKSFNRGEC

SEQ ID NO: 472 - DNA, 57 bp, synthetic construct; identical to SEQ ID NO: 203
  misc_feature 1..57: note = Description of Artificial Sequence: Synthetic oligonucleotide
  source 1..57: mol_type = other DNA

SEQ ID NO: 473 - DNA, 336 bp, synthetic construct
  misc_feature 1..336: note = Description of Artificial Sequence: Synthetic polynucleotide
  source 1..336: mol_type = other DNA
gacgtcgtgatgacacagtcccccctgtccctgcctgtgaccctgggacagcctgcctccatctcctgcagatcctcccagtccatcctgcactccaacggcaacacctacctggaatggttccagcagcggcctggccagtctcccagacggctgatctccaaggtgtccaaccggttctccggcgtgcccgacagattctccggctctggctctggcaccgacttcaccctgaagatctcccgggtggaagccgaggacgtgggcgtgtactactgttttcaaggctcccacgtgcccttcaccttcggccagggcaccaagctggaaatcaaa

SEQ ID NO: 474 - protein, 112 aa, synthetic construct
  REGION 1..112: note = Description of Artificial Sequence: Synthetic polypeptide
DVVMTQSPLSLPVTLGQPASISCRSSQSILHSNGNTYLEWFQQRPGQSPRRLISKVSNRFSGVPDRFSGSGSGTDFTLKISRVEAEDVGVYYCFQGSHVPFTFGQGTKLEIK

SEQ ID NO: 475 - DNA, 321 bp, synthetic construct; identical to SEQ ID NO: 421
  misc_feature 1..321: note = Description of Artificial Sequence: Synthetic polynucleotide
  source 1..321: mol_type = other DNA

SEQ ID NO: 476 - protein, 107 aa, synthetic construct [sequence omitted]

SEQ ID NO: 477 - DNA, 717 bp, synthetic construct
  misc_feature 1..717: note = Description of Artificial Sequence: Synthetic polynucleotide
  source 1..717: mol_type = other DNA
atgggctggtcctgcatcatcctgtttctggtggccaccgccaccggcgtgcacagcgacgtcgtgatgacacagtcccccctgtccctgcctgtgaccctgggacagcctgcctccatctcctgcagatcctcccagtccatcgtgcactccaacggcaacacctacctggaatggttccagcagcggcctggccagtctcccagacggctgatctccaaggtgtccaaccggttctccggcgtgcccgacagattctccggctctggctctggcaccgacttcaccctgaagatctcccgggtggaagccgaggacgtgggcgtgtactactgttttcaaggctcccacgtgcccttcaccttcggccagggcaccaagctggaaatcaaacgaactgtggctgcaccatctgtcttcatcttcccgccatctgatgagcagttgaaatctggaactgcctctgttgtgtgcctgctgaataacttctatcccagagaggccaaagtacagtggaaggtggataacgccctccaatcgggtaactcccaggagagtgtcacagagcaggacagcaaggacagcacctacagcctcagcagcaccctgacgctgagcaaagcagactacgagaaacacaaagtctacgcctgcgaagtcacccatcagggcctgagctcgcccgtcacaaagagcttcaacaggggagagtgttga

SEQ ID NO: 478 - DNA, 660 bp, synthetic construct
  misc_feature 1..660: note = Description of Artificial Sequence: Synthetic polynucleotide
  source 1..660: mol_type = other DNA
gacgtcgtgatgacacagtcccccctgtccctgcctgtgaccctgggacagcctgcctccatctcctgcagatcctcccagtccatcgtgcactccaacggcaacacctacctggaatggttccagcagcggcctggccagtctcccagacggctgatctccaaggtgtccaaccggttctccggcgtgcccgacagattctccggctctggctctggcaccgacttcaccctgaagatctcccgggtggaagccgaggacgtgggcgtgtactactgttttcaaggctcccacgtgcccttcaccttcggccagggcaccaagctggaaatcaaacgaactgtggctgcaccatctgtcttcatcttcccgccatctgatgagcagttgaaatctggaactgcctctgttgtgtgcctgctgaataacttctatcccagagaggccaaagtacagtggaaggtggataacgccctccaatcgggtaactcccaggagagtgtcacagagcaggacagcaaggacagcacctacagcctcagcagcaccctgacgctgagcaaagcagactacgagaaacacaaagtctacgcctgcgaagtcacccatcagggcctgagctcgcccgtcacaaagagcttcaacaggggagagtgttga

SEQ ID NO: 479 - protein, 238 aa, synthetic construct
  REGION 1..238: note = Description of Artificial Sequence: Synthetic polypeptide
MGWSCIILFLVATATGVHSDVVMTQSPLSLPVTLGQPASISCRSSQSIVHSNGNTYLEWFQQRPGQSPRRLISKVSNRFSGVPDRFSGSGSGTDFTLKISRVEAEDVGVYYCFQGSHVPFTFGQGTKLEIKRTVAAPSVFIFPPSDEQLKSGTASVVCLLNNFYPREAKVQWKVDNALQSGNSQESVTEQDSKDSTYSLSSTLTLSKADYEKHKVYACEVTHQGLSSPVTKSFNRGEC

SEQ ID NO: 480 - protein, 219 aa, synthetic construct
  REGION 1..219: note = Description of Artificial Sequence: Synthetic polypeptide
DVVMTQSPLSLPVTLGQPASISCRSSQSIVHSNGNTYLEWFQQRPGQSPRRLISKVSNRFSGVPDRFSGSGSGTDFTLKISRVEAEDVGVYYCFQGSHVPFTFGQGTKLEIKRTVAAPSVFIFPPSDEQLKSGTASVVCLLNNFYPREAKVQWKVDNALQSGNSQESVTEQDSKDSTYSLSSTLTLSKADYEKHKVYACEVTHQGLSSPVTKSFNRGEC

SEQ ID NO: 481 - DNA, 57 bp, synthetic construct; identical to SEQ ID NO: 203
  misc_feature 1..57: note = Description of Artificial Sequence: Synthetic oligonucleotide
  source 1..57: mol_type = other DNA

SEQ ID NO: 482 - DNA, 336 bp, synthetic construct
  misc_feature 1..336: note = Description of Artificial Sequence: Synthetic polynucleotide
  source 1..336: mol_type = other DNA
gacgtcgtgatgacacagtcccccctgtccctgcctgtgaccctgggacagcctgcctccatctcctgcagatcctcccagtccatcgtgcactccaacggcaacacctacctggaatggttccagcagcggcctggccagtctcccagacggctgatctccaaggtgtccaaccggttctccggcgtgcccgacagattctccggctctggctctggcaccgacttcaccctgaagatctcccgggtggaagccgaggacgtgggcgtgtactactgttttcaaggctcccacgtgcccttcaccttcggccagggcaccaagctggaaatcaaa

SEQ ID NO: 483 - protein, 112 aa, synthetic construct
  REGION 1..112: note = Description of Artificial Sequence: Synthetic polypeptide
DVVMTQSPLSLPVTLGQPASISCRSSQSIVHSNGNTYLEWFQQRPGQSPRRLISKVSNRFSGVPDRFSGSGSGTDFTLKISRVEAEDVGVYYCFQGSHVPFTFGQGTKLEIK

SEQ ID NO: 484 - protein, 107 aa, synthetic construct [sequence omitted]

SEQ ID NO: 485 - DNA, 717 bp, synthetic construct
  misc_feature 1..717: note = Description of Artificial Sequence: Synthetic polynucleotide
  source 1..717: mol_type = other DNA
atgggctggtcctgcatcatcctgtttctggtggccaccgccaccggcgtgcacagcgacgtcgtgatgacacagtcccccctgtccctgcctgtgaccctgggacagcctgcctccatctcctgcagatcctcccagtccatcgtgcactccaacggcaacacctacctgaactggttccagcagcggcctggccagtctcccagacggctgatctccaaggtgtccaaccggttctccggcgtgcccgacagattctccggctctggctctggcaccgacttcaccctgaagatctcccgggtggaagccgaggacgtgggcgtgtactactgttttcaaggctcccacgtgcccttcaccttcggccagggcaccaagctggaaatcaaacgaactgtggctgcaccatctgtcttcatcttcccgccatctgatgagcagttgaaatctggaactgcctctgttgtgtgcctgctgaataacttctatcccagagaggccaaagtacagtggaaggtggataacgccctccaatcgggtaactcccaggagagtgtcacagagcaggacagcaaggacagcacctacagcctcagcagcaccctgacgctgagcaaagcagactacgagaaacacaaagtctacgcctgcgaagtcacccatcagggcctgagctcgcccgtcacaaagagcttcaacaggggagagtgttga

SEQ ID NO: 486 - DNA, 660 bp, synthetic construct
  misc_feature 1..660: note = Description of Artificial Sequence: Synthetic polynucleotide
  source 1..660: mol_type = other DNA
gacgtcgtgatgacacagtcccccctgtccctgcctgtgaccctgggacagcctgcctccatctcctgcagatcctcccagtccatcgtgcactccaacggcaacacctacctgaactggttccagcagcggcctggccagtctcccagacggctgatctccaaggtgtccaaccggttctccggcgtgcccgacagattctccggctctggctctggcaccgacttcaccctgaagatctcccgggtggaagccgaggacgtgggcgtgtactactgttttcaaggctcccacgtgcccttcaccttcggccagggcaccaagctggaaatcaaacgaactgtggctgcaccatctgtcttcatcttcccgccatctgatgagcagttgaaatctggaactgcctctgttgtgtgcctgctgaataacttctatcccagagaggccaaagtacagtggaaggtggataacgccctccaatcgggtaactcccaggagagtgtcacagagcaggacagcaaggacagcacctacagcctcagcagcaccctgacgctgagcaaagcagactacgagaaacacaaagtctacgcctgcgaagtcacccatcagggcctgagctcgcccgtcacaaagagcttcaacaggggagagtgttga

SEQ ID NO: 487 - protein, 238 aa, synthetic construct
  REGION 1..238: note = Description of Artificial Sequence: Synthetic polypeptide
MGWSCIILFLVATATGVHSDVVMTQSPLSLPVTLGQPASISCRSSQSIVHSNGNTYLNWFQQRPGQSPRRLISKVSNRFSGVPDRFSGSGSGTDFTLKISRVEAEDVGVYYCFQGSHVPFTFGQGTKLEIKRTVAAPSVFIFPPSDEQLKSGTASVVCLLNNFYPREAKVQWKVDNALQSGNSQESVTEQDSKDSTYSLSSTLTLSKADYEKHKVYACEVTHQGLSSPVTKSFNRGEC

SEQ ID NO: 488 - protein, 219 aa, synthetic construct
  REGION 1..219: note = Description of Artificial Sequence: Synthetic polypeptide
DVVMTQSPLSLPVTLGQPASISCRSSQSIVHSNGNTYLNWFQQRPGQSPRRLISKVSNRFSGVPDRFSGSGSGTDFTLKISRVEAEDVGVYYCFQGSHVPFTFGQGTKLEIKRTVAAPSVFIFPPSDEQLKSGTASVVCLLNNFYPREAKVQWKVDNALQSGNSQESVTEQDSKDSTYSLSSTLTLSKADYEKHKVYACEVTHQGLSSPVTKSFNRGEC

SEQ ID NO: 489 - DNA, 57 bp, synthetic construct; identical to SEQ ID NO: 203
  misc_feature 1..57: note = Description of Artificial Sequence: Synthetic oligonucleotide
  source 1..57: mol_type = other DNA

SEQ ID NO: 490 - DNA, 336 bp, synthetic construct
  misc_feature 1..336: note = Description of Artificial Sequence: Synthetic polynucleotide
  source 1..336: mol_type = other DNA
gacgtcgtgatgacacagtcccccctgtccctgcctgtgaccctgggacagcctgcctccatctcctgcagatcctcccagtccatcgtgcactccaacggcaacacctacctgaactggttccagcagcggcctggccagtctcccagacggctgatctccaaggtgtccaaccggttctccggcgtgcccgacagattctccggctctggctctggcaccgacttcaccctgaagatctcccgggtggaagccgaggacgtgggcgtgtactactgttttcaaggctcccacgtgcccttcaccttcggccagggcaccaagctggaaatcaaa

SEQ ID NO: 491 - protein, 112 aa, synthetic construct
  REGION 1..112: note = Description of Artificial Sequence: Synthetic polypeptide
DVVMTQSPLSLPVTLGQPASISCRSSQSIVHSNGNTYLNWFQQRPGQSPRRLISKVSNRFSGVPDRFSGSGSGTDFTLKISRVEAEDVGVYYCFQGSHVPFTFGQGTKLEIK

SEQ ID NO: 492 - DNA, 321 bp, synthetic construct; identical to SEQ ID NO: 421
  misc_feature 1..321: note = Description of Artificial Sequence: Synthetic polynucleotide
  source 1..321: mol_type = other DNA

SEQ ID NO: 493 - protein, 107 aa, synthetic construct [sequence omitted]

SEQ ID NO: 494 - DNA, 717 bp, synthetic construct
  misc_feature 1..717: note = Description of Artificial Sequence: Synthetic polynucleotide
  source 1..717: mol_type = other DNA
atgggctggtcctgcatcatcctgtttctggtggccaccgccaccggcgtgcacagcgacgtcgtgatgacacagtcccccctgtccctgcctgtgaccctgggacagcctgcctccatctcctgcagatcctcccagtccatcgtgcactccaacggcaacacctacctggaatggttccagcagcggcctggccagtctcccagacggctgatctacaaggtgtccaaccggttctccggcgtgcccgacagattctccggctctggctctggcaccgacttcaccctgaagatctcccgggtggaagccgaggacgtgggcgtgtactactgttttcaaggctcccacgtgcccttcaccttcggccagggcaccaagctggaaatcaaacgaactgtggctgcaccatctgtcttcatcttcccgccatctgatgagcagttgaaatctggaactgcctctgttgtgtgcctgctgaataacttctatcccagagaggccaaagtacagtggaaggtggataacgccctccaatcgggtaactcccaggagagtgtcacagagcaggacagcaaggacagcacctacagcctcagcagcaccctgacgctgagcaaagcagactacgagaaacacaaagtctacgcctgcgaagtcacccatcagggcctgagctcgcccgtcacaaagagcttcaacaggggagagtgttga

SEQ ID NO: 495 - DNA, 660 bp, synthetic construct
  misc_feature 1..660: note = Description of Artificial Sequence: Synthetic polynucleotide
  source 1..660: mol_type = other DNA
gacgtcgtgatgacacagtcccccctgtccctgcctgtgaccctgggacagcctgcctccatctcctgcagatcctcccagtccatcgtgcactccaacggcaacacctacctggaatggttccagcagcggcctggccagtctcccagacggctgatctacaaggtgtccaaccggttctccggcgtgcccgacagattctccggctctggctctggcaccgacttcaccctgaagatctcccgggtggaagccgaggacgtgggcgtgtactactgttttcaaggctcccacgtgcccttcaccttcggccagggcaccaagctggaaatcaaacgaactgtggctgcaccatctgtcttcatcttcccgccatctgatgagcagttgaaatctggaactgcctctgttgtgtgcctgctgaataacttctatcccagagaggccaaagtacagtggaaggtggataacgccctccaatcgggtaactcccaggagagtgtcacagagcaggacagcaaggacagcacctacagcctcagcagcaccctgacgctgagcaaagcagactacgagaaacacaaagtctacgcctgcgaagtcacccatcagggcctgagctcgcccgtcacaaagagcttcaacaggggagagtgttga

SEQ ID NO: 496 - protein, 238 aa, synthetic construct
  REGION 1..238: note = Description of Artificial Sequence: Synthetic polypeptide
MGWSCIILFLVATATGVHSDVVMTQSPLSLPVTLGQPASISCRSSQSIVHSNGNTYLEWFQQRPGQSPRRLIYKVSNRFSGVPDRFSGSGSGTDFTLKISRVEAEDVGVYYCFQGSHVPFTFGQGTKLEIKRTVAAPSVFIFPPSDEQLKSGTASVVCLLNNFYPREAKVQWKVDNALQSGNSQESVTEQDSKDSTYSLSSTLTLSKADYEKHKVYACEVTHQGLSSPVTKSFNRGEC

SEQ ID NO: 497 - protein, 219 aa, synthetic construct
  REGION 1..219: note = Description of Artificial Sequence: Synthetic polypeptide
DVVMTQSPLSLPVTLGQPASISCRSSQSIVHSNGNTYLEWFQQRPGQSPRRLIYKVSNRFSGVPDRFSGSGSGTDFTLKISRVEAEDVGVYYCFQGSHVPFTFGQGTKLEIKRTVAAPSVFIFPPSDEQLKSGTASVVCLLNNFYPREAKVQWKVDNALQSGNSQESVTEQDSKDSTYSLSSTLTLSKADYEKHKVYACEVTHQGLSSPVTKSFNRGEC

SEQ ID NO: 498 - DNA, 57 bp, synthetic construct; identical to SEQ ID NO: 203
  misc_feature 1..57: note = Description of Artificial Sequence: Synthetic oligonucleotide
  source 1..57: mol_type = other DNA

SEQ ID NO: 499 - DNA, 336 bp, synthetic construct
  misc_feature 1..336: note = Description of Artificial Sequence: Synthetic polynucleotide
  source 1..336: mol_type = other DNA
gacgtcgtgatgacacagtcccccctgtccctgcctgtgaccctgggacagcctgcctccatctcctgcagatcctcccagtccatcgtgcactccaacggcaacacctacctggaatggttccagcagcggcctggccagtctcccagacggctgatctacaaggtgtccaaccggttctccggcgtgcccgacagattctccggctctggctctggcaccgacttcaccctgaagatctcccgggtggaagccgaggacgtgggcgtgtactactgttttcaaggctcccacgtgcccttcaccttcggccagggcaccaagctggaaatcaaa

SEQ ID NO: 500 - protein, 112 aa, synthetic construct
  REGION 1..112: note = Description of Artificial Sequence: Synthetic polypeptide
DVVMTQSPLSLPVTLGQPASISCRSSQSIVHSNGNTYLEWFQQRPGQSPRRLIYKVSNRFSGVPDRFSGSGSGTDFTLKISRVEAEDVGVYYCFQGSHVPFTFGQGTKLEIK

SEQ ID NO: 501 - DNA, 321 bp, synthetic construct; identical to SEQ ID NO: 421
  misc_feature 1..321: note = Description of Artificial Sequence: Synthetic polynucleotide
  source 1..321: mol_type = other DNA

SEQ ID NO: 502 - protein, 107 aa, synthetic construct [sequence omitted]

SEQ ID NO: 503 - DNA, 717 bp, synthetic construct
  misc_feature 1..717: note = Description of Artificial Sequence: Synthetic polynucleotide
  source 1..717: mol_type = other DNA
atgggctggtcctgcatcatcctgtttctggtggccaccgccaccggcgtgcacagcgatatccagatgacccagtccccttccagcctgtccgcctctgtgggcgacagagtgaccatcacctgtcggtcctcccagtccatcctgcactccaacggcaacacctacctggaatggtatcagcagaagcccggcaaggcccctaagctgctgatctacaaggtgtccaaccggttctccggcgtgccctccagattctccggctctggctctggcaccgacttcaccctgaccatctccagcctccagcccgaggacttcgccacctactactgttttcaaggctcccacgtgcccttcaccttcggccagggcaccaagctggaaatcaaacgaactgtggctgcaccatctgtcttcatcttcccgccatctgatgagcagttgaaatctggaactgcctctgttgtgtgcctgctgaataacttctatcccagagaggccaaagtacagtggaaggtggataacgccctccaatcgggtaactcccaggagagtgtcacagagcaggacagcaaggacagcacctacagcctcagcagcaccctgacgctgagcaaagcagactacgagaaacacaaagtctacgcctgcgaagtcacccatcagggcctgagctcgcccgtcacaaagagcttcaacaggggagagtgttga

SEQ ID NO: 504 - DNA, 660 bp, synthetic construct
  misc_feature 1..660: note = Description of Artificial Sequence: Synthetic polynucleotide
  source 1..660: mol_type = other DNA
gatatccagatgacccagtccccttccagcctgtccgcctctgtgggcgacagagtgaccatcacctgtcggtcctcccagtccatcctgcactccaacggcaacacctacctggaatggtatcagcagaagcccggcaaggcccctaagctgctgatctacaaggtgtccaaccggttctccggcgtgccctccagattctccggctctggctctggcaccgacttcaccctgaccatctccagcctccagcccgaggacttcgccacctactactgttttcaaggctcccacgtgcccttcaccttcggccagggcaccaagctggaaatcaaacgaactgtggctgcaccatctgtcttcatcttcccgccatctgatgagcagttgaaatctggaactgcctctgttgtgtgcctgctgaataacttctatcccagagaggccaaagtacagtggaaggtggataacgccctccaatcgggtaactcccaggagagtgtcacagagcaggacagcaaggacagcacctacagcctcagcagcaccctgacgctgagcaaagcagactacgagaaacacaaagtctacgcctgcgaagtcacccatcagggcctgagctcgcccgtcacaaagagcttcaacaggggagagtgttga

SEQ ID NO: 505 - protein, 238 aa, synthetic construct
  REGION 1..238: note = Description of Artificial Sequence: Synthetic polypeptide
MGWSCIILFLVATATGVHSDIQMTQSPSSLSASVGDRVTITCRSSQSILHSNGNTYLEWYQQKPGKAPKLLIYKVSNRFSGVPSRFSGSGSGTDFTLTISSLQPEDFATYYCFQGSHVPFTFGQGTKLEIKRTVAAPSVFIFPPSDEQLKSGTASVVCLLNNFYPREAKVQWKVDNALQSGNSQESVTEQDSKDSTYSLSSTLTLSKADYEKHKVYACEVTHQGLSSPVTKSFNRGEC

SEQ ID NO: 506 - protein, 219 aa, synthetic construct
  REGION 1..219: note = Description of Artificial Sequence: Synthetic polypeptide
DIQMTQSPSSLSASVGDRVTITCRSSQSILHSNGNTYLEWYQQKPGKAPKLLIYKVSNRFSGVPSRFSGSGSGTDFTLTISSLQPEDFATYYCFQGSHVPFTFGQGTKLEIKRTVAAPSVFIFPPSDEQLKSGTASVVCLLNNFYPREAKVQWKVDNALQSGNSQESVTEQDSKDSTYSLSSTLTLSKADYEKHKVYACEVTHQGLSSPVTKSFNRGEC

SEQ ID NO: 507 - DNA, 57 bp, synthetic construct; identical to SEQ ID NO: 203
  misc_feature 1..57: note = Description of Artificial Sequence: Synthetic oligonucleotide
  source 1..57: mol_type = other DNA

SEQ ID NO: 508 - DNA, 336 bp, synthetic construct
  misc_feature 1..336: note = Description of Artificial Sequence: Synthetic polynucleotide
  source 1..336: mol_type = other DNA
gatatccagatgacccagtccccttccagcctgtccgcctctgtgggcgacagagtgaccatcacctgtcggtcctcccagtccatcctgcactccaacggcaacacctacctggaatggtatcagcagaagcccggcaaggcccctaagctgctgatctacaaggtgtccaaccggttctccggcgtgccctccagattctccggctctggctctggcaccgacttcaccctgaccatctccagcctccagcccgaggacttcgccacctactactgttttcaaggctcccacgtgcccttcaccttcggccagggcaccaagctggaaatcaaa

SEQ ID NO: 509 - protein, 112 aa, synthetic construct
  REGION 1..112: note = Description of Artificial Sequence: Synthetic polypeptide
DIQMTQSPSSLSASVGDRVTITCRSSQSILHSNGNTYLEWYQQKPGKAPKLLIYKVSNRFSGVPSRFSGSGSGTDFTLTISSLQPEDFATYYCFQGSHVPFTFGQGTKLEIK

SEQ ID NO: 510 - DNA, 657 bp, synthetic construct
  misc_feature 1..657: note = Description of Artificial Sequence: Synthetic polynucleotide
  source 1..657: mol_type = other DNA
gatatccagatgacccagtccccttccagcctgtccgcctctgtgggcgacagagtgaccatcacctgtcggtcctcccagtccatcctgcactccaacggcaacacctacctggaatggtatcagcagaagcccggcaaggcccctaagctgctgatctacaaggtgtccaaccggttctccggcgtgccctccagattctccggctctggctctggcaccgacttcaccctgaccatctccagcctccagcccgaggacttcgccacctactactgttttcaaggctcccacgtgcccttcaccttcggccagggcaccaagctggaaatcaaacgaactgtggctgcaccatctgtcttcatcttcccgccatctgatgagcagttgaaatctggaactgcctctgttgtgtgcctgctgaataacttctatcccagagaggccaaagtacagtggaaggtggataacgccctccaatcgggtaactcccaggagagtgtcacagagcaggacagcaaggacagcacctacagcctcagcagcaccctgacgctgagcaaagcagactacgagaaacacaaagtctacgcctgcgaagtcacccatcagggcctgagctcgcccgtcacaaagagcttcaacaggggagagtgt

SEQ ID NO: 511 - protein, 107 aa, synthetic construct [sequence omitted]

SEQ ID NO: 512 - DNA, 717 bp, synthetic construct
  misc_feature 1..717: note = Description of Artificial Sequence: Synthetic polynucleotide
  source 1..717: mol_type = other DNA
atgggctggtcctgcatcatcctgtttctggtggccaccgccaccggcgtgcacagcgacgtgcagatgacccagtccccttccagcctgtctgcctccgtgggcgacagagtgaccatcacctgtcggtcctcccagtccatcctgcactccaacggcaacacctacctggaatggtatcagcagaagcccggcaaggcccctaagctgctgatctgcaaggtgtccaaccggttctccggcgtgccctccagattctccggctctggctctggcaccgacttcaccctgaccatctccagcctccagcccgaggacttcgccacctactactgttttcaaggctcccacgtgcccttcaccttcggccagggcaccaagctggaaatcaaacgaactgtggctgcaccatctgtcttcatcttcccgccatctgatgagcagttgaaatctggaactgcctctgttgtgtgcctgctgaataacttctatcccagagaggccaaagtacagtggaaggtggataacgccctccaatcgggtaactcccaggagagtgtcacagagcaggacagcaaggacagcacctacagcctcagcagcaccctgacgctgagcaaagcagactacgagaaacacaaagtctacgcctgcgaagtcacccatcagggcctgagctcgcccgtcacaaagagcttcaacaggggagagtgttga

SEQ ID NO: 513 - DNA, 660 bp, synthetic construct
  misc_feature 1..660: note = Description of Artificial Sequence: Synthetic polynucleotide
  source 1..660: mol_type = other DNA
gacgtgcagatgacccagtccccttccagcctgtctgcctccgtgggcgacagagtgaccatcacctgtcggtcctcccagtccatcctgcactccaacggcaacacctacctggaatggtatcagcagaagcccggcaaggcccctaagctgctgatctgcaaggtgtccaaccggttctccggcgtgccctccagattctccggctctggctctggcaccgacttcaccctgaccatctccagcctccagcccgaggacttcgccacctactactgttttcaaggctcccacgtgcccttcaccttcggccagggcaccaagctggaaatcaaacgaactgtggctgcaccatctgtcttcatcttcccgccatctgatgagcagttgaaatctggaactgcctctgttgtgtgcctgctgaataacttctatcccagagaggccaaagtacagtggaaggtggataacgccctccaatcgggtaactcccaggagagtgtcacagagcaggacagcaaggacagcacctacagcctcagcagcaccctgacgctgagcaaagcagactacgagaaacacaaagtctacgcctgcgaagtcacccatcagggcctgagctcgcccgtcacaaagagcttcaacaggggagagtgttga

SEQ ID NO: 514 - protein, 238 aa, synthetic construct
  REGION 1..238: note = Description of Artificial Sequence: Synthetic polypeptide
MGWSCIILFLVATATGVHSDVQMTQSPSSLSASVGDRVTITCRSSQSILHSNGNTYLEWYQQKPGKAPKLLICKVSNRFSGVPSRFSGSGSGTDFTLTISSLQPEDFATYYCFQGSHVPFTFGQGTKLEIKRTVAAPSVFIFPPSDEQLKSGTASVVCLLNNFYPREAKVQWKVDNALQSGNSQESVTEQDSKDSTYSLSSTLTLSKADYEKHKVYACEVTHQGLSSPVTKSFNRGEC

SEQ ID NO: 515 - protein, 219 aa, synthetic construct
  REGION 1..219: note = Description of Artificial Sequence: Synthetic polypeptide
DVQMTQSPSSLSASVGDRVTITCRSSQSILHSNGNTYLEWYQQKPGKAPKLLICKVSNRFSGVPSRFSGSGSGTDFTLTISSLQPEDFATYYCFQGSHVPFTFGQGTKLEIKRTVAAPSVFIFPPSDEQLKSGTASVVCLLNNFYPREAKVQWKVDNALQSGNSQESVTEQDSKDSTYSLSSTLTLSKADYEKHKVYACEVTHQGLSSPVTKSFNRGEC

SEQ ID NO: 516 - DNA, 57 bp, synthetic construct; identical to SEQ ID NO: 203
  misc_feature 1..57: note = Description of Artificial Sequence: Synthetic oligonucleotide
  source 1..57: mol_type = other DNA

SEQ ID NO: 517 - DNA, 336 bp, synthetic construct
  misc_feature 1..336: note = Description of Artificial Sequence: Synthetic polynucleotide
  source 1..336: mol_type = other DNA
gacgtgcagatgacccagtccccttccagcctgtctgcctccgtgggcgacagagtgaccatcacctgtcggtcctcccagtccatcctgcactccaacggcaacacctacctggaatggtatcagcagaagcccggcaaggcccctaagctgctgatctgcaaggtgtccaaccggttctccggcgtgccctccagattctccggctctggctctggcaccgacttcaccctgaccatctccagcctccagcccgaggacttcgccacctactactgttttcaaggctcccacgtgcccttcaccttcggccagggcaccaagctggaaatcaaa

SEQ ID NO: 518 - protein, 112 aa, synthetic construct
  REGION 1..112: note = Description of Artificial Sequence: Synthetic polypeptide
DVQMTQSPSSLSASVGDRVTITCRSSQSILHSNGNTYLEWYQQKPGKAPKLLICKVSNRFSGVPSRFSGSGSGTDFTLTISSLQPEDFATYYCFQGSHVPFTFGQGTKLEIK

SEQ ID NO: 519 - DNA, 321 bp, synthetic construct; identical to SEQ ID NO: 421
  misc_feature 1..321: note = Description of Artificial Sequence: Synthetic polynucleotide
  source 1..321: mol_type = other DNA

SEQ ID NO: 520 - protein, 107 aa, synthetic construct [sequence omitted]

SEQ ID NO: 521 - DNA, 717 bp, synthetic construct
  misc_feature 1..717: note = Description of Artificial Sequence: Synthetic polynucleotide
  source 1..717: mol_type = other DNA
atgggctggtcctgcatcatcctgtttctggtggccaccgccaccggcgtgcacagcgacgtgcagatgacccagtccccttccagcctgtctgcctccgtgggcgacagagtgaccatcacctgtcggtcctcccagtccatcctgcactccaacggcaacacctacctggaatggtatcagcagaagcccggcaaggcccctaagctgctgatctacaaggtgtccaaccggttctccggcgtgccctccagattctccggctctggctctggcaccgacttcaccctgaccatctccagcctccagcccgaggacttcgccacctactactgttttcaaggctcccacgtgcccttcaccttcggccagggcaccaagctggaaatcaaacgaactgtggctgcaccatctgtcttcatcttcccgccatctgatgagcagttgaaatctggaactgcctctgttgtgtgcctgctgaataacttctatcccagagaggccaaagtacagtggaaggtggataacgccctccaatcgggtaactcccaggagagtgtcacagagcaggacagcaaggacagcacctacagcctcagcagcaccctgacgctgagcaaagcagactacgagaaacacaaagtctacgcctgcgaagtcacccatcagggcctgagctcgcccgtcacaaagagcttcaacaggggagagtgttga

SEQ ID NO: 522 - DNA, 660 bp, synthetic construct
  misc_feature 1..660: note = Description of Artificial Sequence: Synthetic polynucleotide
  source 1..660: mol_type = other DNA
gacgtgcagatgacccagtccccttccagcctgtctgcctccgtgggcgacagagtgaccatcacctgtcggtcctcccagtccatcctgcactccaacggcaacacctacctggaatggtatcagcagaagcccggcaaggcccctaagctgctgatctacaaggtgtccaaccggttctccggcgtgccctccagattctccggctctggctctggcaccgacttcaccctgaccatctccagcctccagcccgaggacttcgccacctactactgttttcaaggctcccacgtgcccttcaccttcggccagggcaccaagctggaaatcaaacgaactgtggctgcaccatctgtcttcatcttcccgccatctgatgagcagttgaaatctggaactgcctctgttgtgtgcctgctgaataacttctatcccagagaggccaaagtacagtggaaggtggataacgccctccaatcgggtaactcccaggagagtgtcacagagcaggacagcaaggacagcacctacagcctcagcagcaccctgacgctgagcaaagcagactacgagaaacacaaagtctacgcctgcgaagtcacccatcagggcctgagctcgcccgtcacaaagagcttcaacaggggagagtgttga

SEQ ID NO: 523 - protein, 238 aa, synthetic construct
  REGION 1..238: note = Description of Artificial Sequence: Synthetic polypeptide
MGWSCIILFLVATATGVHSDVQMTQSPSSLSASVGDRVTITCRSSQSILHSNGNTYLEWYQQKPGKAPKLLIYKVSNRFSGVPSRFSGSGSGTDFTLTISSLQPEDFATYYCFQGSHVPFTFGQGTKLEIKRTVAAPSVFIFPPSDEQLKSGTASVVCLLNNFYPREAKVQWKVDNALQSGNSQESVTEQDSKDSTYSLSSTLTLSKADYEKHKVYACEVTHQGLSSPVTKSFNRGEC

SEQ ID NO: 524 - protein, 219 aa, synthetic construct
  REGION 1..219: note = Description of Artificial Sequence: Synthetic polypeptide
DVQMTQSPSSLSASVGDRVTITCRSSQSILHSNGNTYLEWYQQKPGKAPKLLIYKVSNRFSGVPSRFSGSGSGTDFTLTISSLQPEDFATYYCFQGSHVPFTFGQGTKLEIKRTVAAPSVFIFPPSDEQLKSGTASVVCLLNNFYPREAKVQWKVDNALQSGNSQESVTEQDSKDSTYSLSSTLTLSKADYEKHKVYACEVTHQGLSSPVTKSFNRGEC

SEQ ID NO: 525 - DNA, 57 bp, synthetic construct; identical to SEQ ID NO: 203
  misc_feature 1..57: note = Description of Artificial Sequence: Synthetic oligonucleotide
  source 1..57: mol_type = other DNA

SEQ ID NO: 526 - DNA, 336 bp, synthetic construct
  misc_feature 1..336: note = Description of Artificial Sequence: Synthetic polynucleotide
  source 1..336: mol_type = other DNA
gacgtgcagatgacccagtccccttccagcctgtctgcctccgtgggcgacagagtgaccatcacctgtcggtcctcccagtccatcctgcactccaacggcaacacctacctggaatggtatcagcagaagcccggcaaggcccctaagctgctgatctacaaggtgtccaaccggttctccggcgtgccctccagattctccggctctggctctggcaccgacttcaccctgaccatctccagcctccagcccgaggacttcgccacctactactgttttcaaggctcccacgtgcccttcaccttcggccagggcaccaagctggaaatcaaa

SEQ ID NO: 527 - protein, 112 aa, synthetic construct
  REGION 1..112: note = Description of Artificial Sequence: Synthetic polypeptide
DVQMTQSPSSLSASVGDRVTITCRSSQSILHSNGNTYLEWYQQKPGKAPKLLIYKVSNRFSGVPSRFSGSGSGTDFTLTISSLQPEDFATYYCFQGSHVPFTFGQGTKLEIK

SEQ ID NO: 528 - DNA, 321 bp, synthetic construct; identical to SEQ ID NO: 421
  misc_feature 1..321: note = Description of Artificial Sequence: Synthetic polynucleotide
  source 1..321: mol_type = other DNA

SEQ ID NO: 529 - protein, 107 aa, synthetic construct [sequence omitted]

SEQ ID NO: 530 - DNA, 717 bp, synthetic construct
  misc_feature 1..717: note = Description of Artificial Sequence: Synthetic polynucleotide
  source 1..717: mol_type = other DNA
atgggctggtcctgcatcatcctgtttctggtggccaccgccaccggcgtgcacagcgatatccagatgacccagtccccttccagcctgtccgcctctgtgggcgacagagtgaccatcacctgtcggtcctcccagtccatcctgcactccaacggcaacacctacctggaatggtatcagcagaagcccggcaaggcccctaagctgctgatctgcaaggtgtccaaccggttctccggcgtgccctccagattctccggctctggctctggcaccgacttcaccctgaccatctccagcctccagcccgaggacttcgccacctactactgttttcaaggctcccacgtgcccttcaccttcggccagggcaccaagctggaaatcaaacgaactgtggctgcaccatctgtcttcatcttcccgccatctgatgagcagttgaaatctggaactgcctctgttgtgtgcctgctgaataacttctatcccagagaggccaaagtacagtggaaggtggataacgccctccaatcgggtaactcccaggagagtgtcacagagcaggacagcaaggacagcacctacagcctcagcagcaccctgacgctgagcaaagcagactacgagaaacacaaagtctacgcctgcgaagtcacccatcagggcctgagctcgcccgtcacaaagagcttcaacaggggagagtgttga

SEQ ID NO: 531 - DNA, 660 bp, synthetic construct
  misc_feature 1..660: note = Description of Artificial Sequence: Synthetic polynucleotide
  source 1..660: mol_type = other DNA
gatatccagatgacccagtccccttccagcctgtccgcctctgtgggcgacagagtgaccatcacctgtcggtcctcccagtccatcctgcactccaacggcaacacctacctggaatggtatcagcagaagcccggcaaggcccctaagctgctgatctgcaaggtgtccaaccggttctccggcgtgccctccagattctccggctctggctctggcaccgacttcaccctgaccatctccagcctccagcccgaggacttcgccacctactactgttttcaaggctcccacgtgcccttcaccttcggccagggcaccaagctggaaatcaaacgaactgtggctgcaccatctgtcttcatcttcccgccatctgatgagcagttgaaatctggaactgcctctgttgtgtgcctgctgaataacttctatcccagagaggccaaagtacagtggaaggtggataacgccctccaatcgggtaactcccaggagagtgtcacagagcaggacagcaaggacagcacctacagcctcagcagcaccctgacgctgagcaaagcagactacgagaaacacaaagtctacgcctgcgaagtcacccatcagggcctgagctcgcccgtcacaaagagcttcaacaggggagagtgttga

SEQ ID NO: 532 - protein, 238 aa, synthetic construct
  REGION 1..238: note = Description of Artificial Sequence: Synthetic polypeptide
MGWSCIILFLVATATGVHSDIQMTQSPSSLSASVGDRVTITCRSSQSILHSNGNTYLEWYQQKPGKAPKLLICKVSNRFSGVPSRFSGSGSGTDFTLTISSLQPEDFATYYCFQGSHVPFTFGQGTKLEIKRTVAAPSVFIFPPSDEQLKSGTASVVCLLNNFYPREAKVQWKVDNALQSGNSQESVTEQDSKDSTYSLSSTLTLSKADYEKHKVYACEVTHQGLSSPVTKSFNRGEC

SEQ ID NO: 533 - protein, 219 aa, synthetic construct
  REGION 1..219: note = Description of Artificial Sequence: Synthetic polypeptide
DIQMTQSPSSLSASVGDRVTITCRSSQSILHSNGNTYLEWYQQKPGKAPKLLICKVSNRFSGVPSRFSGSGSGTDFTLTISSLQPEDFATYYCFQGSHVPFTFGQGTKLEIKRTVAAPSVFIFPPSDEQLKSGTASVVCLLNNFYPREAKVQWKVDNALQSGNSQESVTEQDSKDSTYSLSSTLTLSKADYEKHKVYACEVTHQGLSSPVTKSFNRGEC

SEQ ID NO: 534 - DNA, 57 bp, synthetic construct; identical to SEQ ID NO: 203
  misc_feature 1..57: note = Description of Artificial Sequence: Synthetic oligonucleotide
  source 1..57: mol_type = other DNA

SEQ ID NO: 535 - DNA, 336 bp, synthetic construct
  misc_feature 1..336: note = Description of Artificial Sequence: Synthetic polynucleotide
  source 1..336: mol_type = other DNA
gatatccagatgacccagtccccttccagcctgtccgcctctgtgggcgacagagtgaccatcacctgtcggtcctcccagtccatcctgcactccaacggcaacacctacctggaatggtatcagcagaagcccggcaaggcccctaagctgctgatctgcaaggtgtccaaccggttctccggcgtgccctccagattctccggctctggctctggcaccgacttcaccctgaccatctccagcctccagcccgaggacttcgccacctactactgttttcaaggctcccacgtgcccttcaccttcggccagggcaccaagctggaaatcaaa

SEQ ID NO: 536 - protein, 112 aa, synthetic construct
  REGION 1..112: note = Description of Artificial Sequence: Synthetic polypeptide
DIQMTQSPSSLSASVGDRVTITCRSSQSILHSNGNTYLEWYQQKPGKAPKLLICKVSNRFSGVPSRFSGSGSGTDFTLTISSLQPEDFATYYCFQGSHVPFTFGQGTKLEIK

SEQ ID NO: 537 - DNA, 324 bp, synthetic construct
  misc_feature 1..324: note = Description of Artificial Sequence: Synthetic polynucleotide
  source 1..324: mol_type = other DNA
cgaactgtggctgcaccatctgtcttcatcttcccgccatctgatgagcagttgaaatctggaactgcctctgttgtgtgcctgctgaataacttctatcccagagaggccaaagtacagtggaaggtggataacgccctccaatcgggtaactcccaggagagtgtcacagagcaggacagcaaggacagcacctacagcctcagcagcaccctgacgctgagcaaagcagactacgagaaacacaaagtctacgcctgcgaagtcacccatcagggcctgagctcgcccgtcacaaagagcttcaacaggggagagtgttga

SEQ ID NO: 538 - protein, 107 aa, synthetic construct [sequence omitted]

SEQ ID NO: 539 - DNA, 717 bp, synthetic construct
  misc_feature 1..717: note = Description of Artificial Sequence: Synthetic polynucleotide
  source 1..717: mol_type = other DNA
atgggctggtcctgcatcatcctgtttctggtggccaccgccaccggcgtgcacagcgacgtgcagatgacccagtccccttccagcctgtctgcctccgtgggcgacagagtgaccatcacctgtcggtcctcccagtccatcctgcactccaacggcaacacctacctggaatggtatcagcagaagcccggcaaggcccctaagctgctgatctccaaggtgtccaaccggttctccggcgtgccctccagattctccggctctggctctggcaccgacttcaccctgaccatctccagcctccagcccgaggacttcgccacctactactgttttcaaggctcccacgtgcccttcaccttcggccagggcaccaagctggaaatcaaacgaactgtggctgcaccatctgtcttcatcttcccgccatctgatgagcagttgaaatctggaactgcctctgttgtgtgcctgctgaataacttctatcccagagaggccaaagtacagtggaaggtggataacgccctccaatcgggtaactcccaggagagtgtcacagagcaggacagcaaggacagcacctacagcctcagcagcaccctgacgctgagcaaagcagactacgagaaacacaaagtctacgcctgcgaagtcacccatcagggcctgagctcgcccgtcacaaagagcttcaacaggggagagtgttga

SEQ ID NO: 540 - DNA, 568 bp, synthetic construct
  misc_feature 1..568: note = Description of Artificial Sequence: Synthetic polynucleotide
  source 1..568: mol_type = other DNA
gacgtgcagatgacccagtccccttccagcctgtctgcctccgtgggcgacagagtgaccatcacctgtcggtcctcccagtccatcctgcactccaacggcaacacctacctggaatggtatcagcagaagcccggcaaggcccctaagctgctgatctccaaggtgtccaaccggttctccggcgtgccctccagattctccggctctggctctggcaccgacttcaccctgaccatctccagcctccagcccgaggacttcgccacctactactgttttcaaggctcccacgtgcccttcaccttcggccagggcaccaagctggaaatcaaacgaactgtggctgcaccatctgtcttcatcttcccgccatctgatgagcagttgaaatctggaactgcctctgttgtgtgcctgctgaataacttctatcccagagaggccaaagtacagtggaaggtggataacgccctccaatcgggtaactcccaggagagtgtcacagagcaggacagcaaggacagcacctacagcctcagcagcaccctgacgctgagcaaagcag

SEQ ID NO: 541 - protein, 238 aa, synthetic construct
  REGION 1..238: note = Description of Artificial Sequence: Synthetic polypeptide
MGWSCIILFLVATATGVHSDVQMTQSPSSLSASVGDRVTITCRSSQSILHSNGNTYLEWYQQKPGKAPKLLISKVSNRFSGVPSRFSGSGSGTDFTLTISSLQPEDFATYYCFQGSHVPFTFGQGTKLEIKRTVAAPSVFIFPPSDEQLKSGTASVVCLLNNFYPREAKVQWKVDNALQSGNSQESVTEQDSKDSTYSLSSTLTLSKADYEKHKVYACEVTHQGLSSPVTKSFNRGEC

SEQ ID NO: 542 - protein, 219 aa, synthetic construct
  REGION 1..219: note = Description of Artificial Sequence: Synthetic polypeptide
DVQMTQSPSSLSASVGDRVTITCRSSQSILHSNGNTYLEWYQQKPGKAPKLLISKVSNRFSGVPSRFSGSGSGTDFTLTISSLQPEDFATYYCFQGSHVPFTFGQGTKLEIKRTVAAPSVFIFPPSDEQLKSGTASVVCLLNNFYPREAKVQWKVDNALQSGNSQESVTEQDSKDSTYSLSSTLTLSKADYEKHKVYACEVTHQGLSSPVTKSFNRGEC

SEQ ID NO: 543 - DNA, 57 bp, synthetic construct; identical to SEQ ID NO: 203
  misc_feature 1..57: note = Description of Artificial Sequence: Synthetic oligonucleotide
  source 1..57: mol_type = other DNA

SEQ ID NO: 544 - DNA, 336 bp, synthetic construct
  misc_feature 1..336: note = Description of Artificial Sequence: Synthetic polynucleotide
  source 1..336: mol_type = other DNA
gacgtgcagatgacccagtccccttccagcctgtctgcctccgtgggcgacagagtgaccatcacctgtcggtcctcccagtccatcctgcactccaacggcaacacctacctggaatggtatcagcagaagcccggcaaggcccctaagctgctgatctccaaggtgtccaaccggttctccggcgtgccctccagattctccggctctggctctggcaccgacttcaccctgaccatctccagcctccagcccgaggacttcgccacctactactgttttcaaggctcccacgtgcccttcaccttcggccagggcaccaagctggaaatcaaa

SEQ ID NO: 545 - protein, 112 aa, synthetic construct
  REGION 1..112: note = Description of Artificial Sequence: Synthetic polypeptide
DVQMTQSPSSLSASVGDRVTITCRSSQSILHSNGNTYLEWYQQKPGKAPKLLISKVSNRFSGVPSRFSGSGSGTDFTLTISSLQPEDFATYYCFQGSHVPFTFGQGTKLEIK

SEQ ID NO: 546 - DNA, 321 bp, synthetic construct; identical to SEQ ID NO: 421
  misc_feature 1..321: note = Description of Artificial Sequence: Synthetic polynucleotide
  source 1..321: mol_type = other DNA

SEQ ID NO: 547 - protein, 107 aa, synthetic construct [sequence omitted]

SEQ ID NO: 548 - DNA, 717 bp, synthetic construct
  misc_feature 1..717: note = Description of Artificial Sequence: Synthetic polynucleotide
  source 1..717: mol_type = other DNA
atgggctggtcctgcatcatcctgtttctggtggccaccgccaccggcgtgcacagcgacgtgcagatgacccagtccccttccagcctgtctgcctccgtgggcgacagagtgaccatcacctgtcggtcctcccagtccatcgtgcactccaacggcaacacctacctggaatggtatcagcagaagcccggcaaggcccctaagctgctgatctccaaggtgtccaaccggttctccggcgtgccctccagattctccggctctggctctggcaccgacttcaccctgaccatctccagcctccagcccgaggacttcgccacctactactgttttcaaggctcccacgtgcccttcaccttcggccagggcaccaagctggaaatcaaacgaactgtggctgcaccatctgtcttcatcttcccgccatctgatgagcagttgaaatctggaactgcctctgttgtgtgcctgctgaataacttctatcccagagaggccaaagtacagtggaaggtggataacgccctccaatcgggtaactcccaggagagtgtcacagagcaggacagcaaggacagcacctacagcctcagcagcaccctgacgctgagcaaagcagactacgagaaacacaaagtctacgcctgcgaagtcacccatcagggcctgagctcgcccgtcacaaagagcttcaacaggggagagtgttga

SEQ ID NO: 549 - DNA, 660 bp, synthetic construct
  misc_feature 1..660: note = Description of Artificial Sequence: Synthetic polynucleotide
  source 1..660: mol_type = other DNA
gacgtgcagatgacccagtccccttccagcctgtctgcctccgtgggcgacagagtgaccatcacctgtcggtcctcccagtccatcgtgcactccaacggcaacacctacctggaatggtatcagcagaagcccggcaaggcccctaagctgctgatctccaaggtgtccaaccggttctccggcgtgccctccagattctccggctctggctctggcaccgacttcaccctgaccatctccagcctccagcccgaggacttcgccacctactactgttttcaaggctcccacgtgcccttcaccttcggccagggcaccaagctggaaatcaaacgaactgtggctgcaccatctgtcttcatcttcccgccatctgatgagcagttgaaatctggaactgcctctgttgtgtgcctgctgaataacttctatcccagagaggccaaagtacagtggaaggtggataacgccctccaatcgggtaactcccaggagagtgtcacagagcaggacagcaaggacagcacctacagcctcagcagcaccctgacgctgagcaaagcagactacgagaaacacaaagtctacgcctgcgaagtcacccatcagggcctgagctcgcccgtcacaaagagcttcaacaggggagagtgttga

SEQ ID NO: 550 - protein, 238 aa, synthetic construct
  REGION 1..238: note = Description of Artificial Sequence: Synthetic polypeptide
MGWSCIILFLVATATGVHSDVQMTQSPSSLSASVGDRVTITCRSSQSIVHSNGNTYLEWYQQKPGKAPKLLISKVSNRFSGVPSRFSGSGSGTDFTLTISSLQPEDFATYYCFQGSHVPFTFGQGTKLEIKRTVAAPSVFIFPPSDEQLKSGTASVVCLLNNFYPREAKVQWKVDNALQSGNSQESVTEQDSKDSTYSLSSTLTLSKADYEKHKVYACEVTHQGLSSPVTKSFNRGEC

SEQ ID NO: 551 - protein, 219 aa, synthetic construct
  REGION 1..219: note = Description of Artificial Sequence: Synthetic polypeptide
DVQMTQSPSSLSASVGDRVTITCRSSQSIVHSNGNTYLEWYQQKPGKAPKLLISKVSNRFSGVPSRFSGSGSGTDFTLTISSLQPEDFATYYCFQGSHVPFTFGQGTKLEIKRTVAAPSVFIFPPSDEQLKSGTASVVCLLNNFYPREAKVQWKVDNALQSGNSQESVTEQDSKDSTYSLSSTLTLSKADYEKHKVYACEVTHQGLSSPVTKSFNRGEC

SEQ ID NO: 552 - DNA, 57 bp, synthetic construct; identical to SEQ ID NO: 203
  misc_feature 1..57: note = Description of Artificial Sequence: Synthetic oligonucleotide
  source 1..57: mol_type = other DNA

SEQ ID NO: 553 - DNA, 336 bp, synthetic construct
  misc_feature 1..336: note = Description of Artificial Sequence: Synthetic polynucleotide
  source 1..336: mol_type = other DNA
gacgtgcagatgacccagtccccttccagcctgtctgcctccgtgggcgacagagtgaccatcacctgtcggtcctcccagtccatcgtgcactccaacggcaacacctacctggaatggtatcagcagaagcccggcaaggcccctaagctgctgatctccaaggtgtccaaccggttctccggcgtgccctccagattctccggctctggctctggcaccgacttcaccctgaccatctccagcctccagcccgaggacttcgccacctactactgttttcaaggctcccacgtgcccttcaccttcggccagggcaccaagctggaaatcaaa

SEQ ID NO: 554 - protein, 112 aa, synthetic construct
  REGION 1..112: note = Description of Artificial Sequence: Synthetic polypeptide
DVQMTQSPSSLSASVGDRVTITCRSSQSIVHSNGNTYLEWYQQKPGKAPKLLISKVSNRFSGVPSRFSGSGSGTDFTLTISSLQPEDFATYYCFQGSHVPFTFGQGTKLEIK

SEQ ID NO: 555 - DNA, 321 bp, synthetic construct; identical to SEQ ID NO: 421
  misc_feature 1..321: note = Description of Artificial Sequence: Synthetic polynucleotide
  source 1..321: mol_type = other DNA

SEQ ID NO: 556 - protein, 107 aa, synthetic construct [sequence omitted]

SEQ ID NO: 557 - DNA, 717 bp, synthetic construct
  misc_feature 1..717: note = Description of Artificial Sequence: Synthetic polynucleotide
  source 1..717: mol_type = other DNA
atgggctggtcctgcatcatcctgtttctggtggccaccgccaccggcgtgcacagcgacgtgcagatgacccagtccccttccagcctgtctgcctccgtgggcgacagagtgaccatcacctgtcggtcctcccagtccatcgtgcactccaacggcaacacctacctgaactggtatcagcagaagcccggcaaggcccctaagctgctgatctccaaggtgtccaaccggttctccggcgtgccctccagattctccggctctggctctggcaccgacttcaccctgaccatctccagcctccagcccgaggacttcgccacctactactgttttcaaggctcccacgtgcccttcaccttcggccagggcaccaagctggaaatcaaacgaactgtggctgcaccatctgtcttcatcttcccgccatctgatgagcagttgaaatctggaactgcctctgttgtgtgcctgctgaataacttctatcccagagaggccaaagtacagtggaaggtggataacgccctccaatcgggtaactcccaggagagtgtcacagagcaggacagcaaggacagcacctacagcctcagcagcaccctgacgctgagcaaagcagactacgagaaacacaaagtctacgcctgcgaagtcacccatcagggcctgagctcgcccgtcacaaagagcttcaacaggggagagtgttga

SEQ ID NO: 558 - DNA, 660 bp, synthetic construct
  misc_feature 1..660: note = Description of Artificial Sequence: Synthetic polynucleotide
  source 1..660: mol_type = other DNA
gacgtgcagatgacccagtccccttccagcctgtctgcctccgtgggcgacagagtgaccatcacctgtcggtcctcccagtccatcgtgcactccaacggcaacacctacctgaactggtatcagcagaagcccggcaaggcccctaagctgctgatctccaaggtgtccaaccggttctccggcgtgccctccagattctccggctctggctctggcaccgacttcaccctgaccatctccagcctccagcccgaggacttcgccacctactactgttttcaaggctcccacgtgcccttcaccttcggccagggcaccaagctggaaatcaaacgaactgtggctgcaccatctgtcttcatcttcccgccatctgatgagcagttgaaatctggaactgcctctgttgtgtgcctgctgaataacttctatcccagagaggccaaagtacagtggaaggtggataacgccctccaatcgggtaactcccaggagagtgtcacagagcaggacagcaaggacagcacctacagcctcagcagcaccctgacgctgagcaaagcagactacgagaaacacaaagtctacgcctgcgaagtcacccatcagggcctgagctcgcccgtcacaaagagcttcaacaggggagagtgttga

SEQ ID NO: 559 - protein, 238 aa, synthetic construct
  REGION 1..238: note = Description of Artificial Sequence: Synthetic polypeptide
MGWSCIILFLVATATGVHSDVQMTQSPSSLSASVGDRVTITCRSSQSIVHSNGNTYLNWYQQKPGKAPKLLISKVSNRFSGVPSRFSGSGSGTDFTLTISSLQPEDFATYYCFQGSHVPFTFGQGTKLEIKRTVAAPSVFIFPPSDEQLKSGTASVVCLLNNFYPREAKVQWKVDNALQSGNSQESVTEQDSKDSTYSLSSTLTLSKADYEKHKVYACEVTHQGLSSPVTKSFNRGEC

SEQ ID NO: 560 - protein, 219 aa, synthetic construct
  REGION 1..219: note = Description of Artificial Sequence: Synthetic polypeptide
DVQMTQSPSSLSASVGDRVTITCRSSQSIVHSNGNTYLNWYQQKPGKAPKLLISKVSNRFSGVPSRFSGSGSGTDFTLTISSLQPEDFATYYCFQGSHVPFTFGQGTKLEIKRTVAAPSVFIFPPSDEQLKSGTASVVCLLNNFYPREAKVQWKVDNALQSGNSQESVTEQDSKDSTYSLSSTLTLSKADYEKHKVYACEVTHQGLSSPVTKSFNRGEC

SEQ ID NO: 561 - DNA, 57 bp, synthetic construct; identical to SEQ ID NO: 203
  misc_feature 1..57: note = Description of Artificial Sequence: Synthetic oligonucleotide
  source 1..57: mol_type = other DNA

SEQ ID NO: 562 - DNA, 336 bp, synthetic construct
  misc_feature 1..336: note = Description of Artificial Sequence: Synthetic polynucleotide
  source 1..336: mol_type = other DNA
gacgtgcagatgacccagtccccttccagcctgtctgcctccgtgggcgacagagtgaccatcacctgtcggtcctcccagtccatcgtgcactccaacggcaacacctacctgaactggtatcagcagaagcccggcaaggcccctaagctgctgatctccaaggtgtccaaccggttctccggcgtgccctccagattctccggctctggctctggcaccgacttcaccctgaccatctccagcctccagcccgaggacttcgccacctactactgttttcaaggctcccacgtgcccttcaccttcggccagggcaccaagctggaaatcaaa

SEQ ID NO: 563 - protein, 112 aa, synthetic construct
  REGION 1..112: note = Description of Artificial Sequence: Synthetic polypeptide
DVQMTQSPSSLSASVGDRVTITCRSSQSIVHSNGNTYLNWYQQKPGKAPKLLISKVSNRFSGVPSRFSGSGSGTDFTLTISSLQPEDFATYYCFQGSHVPFTFGQGTKLEIK

SEQ ID NO: 564 - DNA, 324 bp, synthetic construct; identical to SEQ ID NO: 537
  misc_feature 1..324: note = Description of Artificial Sequence: Synthetic polynucleotide
  source 1..324: mol_type = other DNA

SEQ ID NO: 565 - protein, 107 aa, synthetic construct [sequence omitted]

SEQ ID NO: 566 - DNA, 717 bp, synthetic construct
  misc_feature 1..717: note = Description of Artificial Sequence: Synthetic polynucleotide
  source 1..717: mol_type = other DNA
atgggctggtcctgcatcatcctgtttctggtggccaccgccaccggcgtgcacagcgatatccagatgacccagtccccttccagcctgtccgcctctgtgggcgacagagtgaccatcacctgtcggtcctcccagtccatcctgcactccaacggcaacacctacctggaatggtatcagcagaagcccggcaaggcccctaagctgctgatctccaaggtgtccaaccggttctccggcgtgccctccagattctccggctctggctctggcaccgacttcaccctgaccatctccagcctccagcccgaggacttcgccacctactactgttttcaaggctcccacgtgcccttcaccttcggccagggcaccaagctggaaatcaaacgaactgtggctgcaccatctgtcttcatcttcccgccatctgatgagcagttgaaatctggaactgcctctgttgtgtgcctgctgaataacttctatcccagagaggccaaagtacagtggaaggtggataacgccctccaatcgggtaactcccaggagagtgtcacagagcaggacagcaaggacagcacctacagcctcagcagcaccctgacgctgagcaaagcagactacgagaaacacaaagtctacgcctgcgaagtcacccatcagggcctgagctcgcccgtcacaaagagcttcaacaggggagagtgttga

SEQ ID NO: 567 - DNA, 660 bp, synthetic construct
  misc_feature 1..660: note = Description of Artificial Sequence: Synthetic polynucleotide
  source 1..660: mol_type = other DNA
gatatccagatgacccagtccccttccagcctgtccgcctctgtgggcgacagagtgaccatcacctgtcggtcctcccagtccatcctgcactccaacggcaacacctacctggaatggtatcagcagaagcccggcaaggcccctaagctgctgatctccaaggtgtccaaccggttctccggcgtgccctccagattctccggctctggctctggcaccgacttcaccctgaccatctccagcctccagcccgaggacttcgccacctactactgttttcaaggctcccacgtgcccttcaccttcggccagggcaccaagctggaaatcaaacgaactgtggctgcaccatctgtcttcatcttcccgccatctgatgagcagttgaaatctggaactgcctctgttgtgtgcctgctgaataacttctatcccagagaggccaaagtacagtggaaggtggataacgccctccaatcgggtaactcccaggagagtgtcacagagcaggacagcaaggacagcacctacagcctcagcagcaccctgacgctgagcaaagcagactacgagaaacacaaagtctacgcctgcgaagtcacccatcagggcctgagctcgcccgtcacaaagagcttcaacaggggagagtgttga

SEQ ID NO: 568 - protein, 238 aa, synthetic construct
  REGION 1..238: note = Description of Artificial Sequence: Synthetic polypeptide
MGWSCIILFLVATATGVHSDIQMTQSPSSLSASVGDRVTITCRSSQSILHSNGNTYLEWYQQKPGKAPKLLISKVSNRFSGVPSRFSGSGSGTDFTLTISSLQPEDFATYYCFQGSHVPFTFGQGTKLEIKRTVAAPSVFIFPPSDEQLKSGTASVVCLLNNFYPREAKVQWKVDNALQSGNSQESVTEQDSKDSTYSLSSTLTLSKADYEKHKVYACEVTHQGLSSPVTKSFNRGEC

SEQ ID NO: 569 - protein, 219 aa, synthetic construct
  REGION 1..219: note = Description of Artificial Sequence: Synthetic polypeptide
DIQMTQSPSSLSASVGDRVTITCRSSQSILHSNGNTYLEWYQQKPGKAPKLLISKVSNRFSGVPSRFSGSGSGTDFTLTISSLQPEDFATYYCFQGSHVPFTFGQGTKLEIKRTVAAPSVFIFPPSDEQLKSGTASVVCLLNNFYPREAKVQWKVDNALQSGNSQESVTEQDSKDSTYSLSSTLTLSKADYEKHKVYACEVTHQGLSSPVTKSFNRGEC

SEQ ID NO: 570 - DNA, 57 bp, synthetic construct; identical to SEQ ID NO: 203
  misc_feature 1..57: note = Description of Artificial Sequence: Synthetic oligonucleotide
  source 1..57: mol_type = other DNA

SEQ ID NO: 571 - DNA, 336 bp, synthetic construct
  misc_feature 1..336: note = Description of Artificial Sequence: Synthetic polynucleotide
  source 1..336: mol_type = other DNA
gatatccagatgacccagtccccttccagcctgtccgcctctgtgggcgacagagtgaccatcacctgtcggtcctcccagtccatcctgcactccaacggcaacacctacctggaatggtatcagcagaagcccggcaaggcccctaagctgctgatctccaaggtgtccaaccggttctccggcgtgccctccagattctccggctctggctctggcaccgacttcaccctgaccatctccagcctccagcccgaggacttcgccacctactactgttttcaaggctcccacgtgcccttcaccttcggccagggcaccaagctggaaatcaaa

SEQ ID NO: 572 - protein, 112 aa, synthetic construct
  REGION 1..112: note = Description of Artificial Sequence: Synthetic polypeptide
DIQMTQSPSSLSASVGDRVTITCRSSQSILHSNGNTYLEWYQQKPGKAPKLLISKVSNRFSGVPSRFSGSGSGTDFTLTISSLQPEDFATYYCFQGSHVPFTFGQGTKLEIK

SEQ ID NO: 573 - DNA, 324 bp, synthetic construct; identical to SEQ ID NO: 537
  misc_feature 1..324: note = Description of Artificial Sequence: Synthetic polynucleotide
  source 1..324: mol_type = other DNA

SEQ ID NO: 574 - protein, 107 aa, synthetic construct [sequence omitted]

SEQ ID NO: 575 - DNA, 717 bp, synthetic construct
  misc_feature 1..717: note = Description of Artificial Sequence: Synthetic polynucleotide
  source 1..717: mol_type = other DNA
atgggctggtcctgcatcatcctgtttctggtggccaccgccaccggcgtgcacagcgacgtcgtgatgacacagtcccccctgtccctgcctgtgaccctgggacagcctgcctccatctcctgcagatcctcccagtccatcctgcactccaacggcaacacctacctggaatggttccagcagcggcctggccagtcccccagactgctgatctccaaggtgtccaaccggttctccggcgtgcccgacagattctccggctctggctctggcaccgacttcaccctgaagatctcccgggtggaagccgaggacgtgggcgtgtactactgttttcaaggctcccacgtgcccttcaccttcggccagggcaccaagctggaaatcaaacgaactgtggctgcaccatctgtcttcatcttcccgccatctgatgagcagttgaaatctggaactgcctctgttgtgtgcctgctgaataacttctatcccagagaggccaaagtacagtggaaggtggataacgccctccaatcgggtaactcccaggagagtgtcacagagcaggacagcaaggacagcacctacagcctcagcagcaccctgacgctgagcaaagcagactacgagaaacacaaagtctacgcctgcgaagtcacccatcagggcctgagctcgcccgtcacaaagagcttcaacaggggagagtgttga

SEQ ID NO: 576 - DNA, 660 bp, synthetic construct
  misc_feature 1..660: note = Description of Artificial Sequence: Synthetic polynucleotide
  source 1..660: mol_type = other DNA
gacgtcgtgatgacacagtcccccctgtccctgcctgtgaccctgggacagcctgcctccatctcctgcagatcctcccagtccatcctgcactccaacggcaacacctacctggaatggttccagcagcggcctggccagtcccccagactgctgatctccaaggtgtccaaccggttctccggcgtgcccgacagattctccggctctggctctggcaccgacttcaccctgaagatctcccgggtggaagccgaggacgtgggcgtgtactactgttttcaaggctcccacgtgcccttcaccttcggccagggcaccaagctggaaatcaaacgaactgtggctgcaccatctgtcttcatcttcccgccatctgatgagcagttgaaatctggaactgcctctgttgtgtgcctgctgaataacttctatcccagagaggccaaagtacagtggaaggtggataacgccctccaatcgggtaactcccaggagagtgtcacagagcaggacagcaaggacagcacctacagcctcagcagcaccctgacgctgagcaaagcagactacgagaaacacaaagtctacgcctgcgaagtcacccatcagggcctgagctcgcccgtcacaaagagcttcaacaggggagagtgttga

SEQ ID NO: 577 - protein, 238 aa, synthetic construct
  REGION 1..238: note = Description of Artificial Sequence: Synthetic polypeptide
MGWSCIILFLVATATGVHSDVVMTQSPLSLPVTLGQPASISCRSSQSILHSNGNTYLEWFQQRPGQSPRLLISKVSNRFSGVPDRFSGSGSGTDFTLKISRVEAEDVGVYYCFQGSHVPFTFGQGTKLEIKRTVAAPSVFIFPPSDEQLKSGTASVVCLLNNFYPREAKVQWKVDNALQSGNSQESVTEQDSKDSTYSLSSTLTLSKADYEKHKVYACEVTHQGLSSPVTKSFNRGEC

SEQ ID NO: 578 - protein, 219 aa, synthetic construct
  REGION 1..219: note = Description of Artificial Sequence: Synthetic polypeptide
DVVMTQSPLSLPVTLGQPASISCRSSQSILHSNGNTYLEWFQQRPGQSPRLLISKVSNRFSGVPDRFSGSGSGTDFTLKISRVEAEDVGVYYCFQGSHVPFTFGQGTKLEIKRTVAAPSVFIFPPSDEQLKSGTASVVCLLNNFYPREAKVQWKVDNALQSGNSQESVTEQDSKDSTYSLSSTLTLSKADYEKHKVYACEVTHQGLSSPVTKSFNRGEC

SEQ ID NO: 579 - DNA, 57 bp, synthetic construct; identical to SEQ ID NO: 203
  misc_feature 1..57: note = Description of Artificial Sequence: Synthetic oligonucleotide
  source 1..57: mol_type = other DNA

SEQ ID NO: 580 - DNA, 336 bp, synthetic construct
  misc_feature 1..336: note = Description of Artificial Sequence: Synthetic polynucleotide
  source 1..336: mol_type = other DNA
gacgtcgtgatgacacagtcccccctgtccctgcctgtgaccctgggacagcctgcctccatctcctgcagatcctcccagtccatcctgcactccaacggcaacacctacctggaatggttccagcagcggcctggccagtcccccagactgctgatctccaaggtgtccaaccggttctccggcgtgcccgacagattctccggctctggctctggcaccgacttcaccctgaagatctcccgggtggaagccgaggacgtgggcgtgtactactgttttcaaggctcccacgtgcccttcaccttcggccagggcaccaagctggaaatcaaa

SEQ ID NO: 581 - protein, 112 aa, synthetic construct
  REGION 1..112: note = Description of Artificial Sequence: Synthetic polypeptide
DVVMTQSPLSLPVTLGQPASISCRSSQSILHSNGNTYLEWFQQRPGQSPRLLISKVSNRFSGVPDRFSGSGSGTDFTLKISRVEAEDVGVYYCFQGSHVPFTFGQGTKLEIK

SEQ ID NO: 582 - DNA, 321 bp, synthetic construct; identical to SEQ ID NO: 421
  misc_feature 1..321: note = Description of Artificial Sequence: Synthetic polynucleotide
  source 1..321: mol_type = other DNA

SEQ ID NO: 583 - protein, 107 aa, synthetic construct [sequence omitted]

SEQ ID NO: 584 - DNA, 717 bp, synthetic construct
  misc_feature 1..717: note = Description of Artificial Sequence: Synthetic polynucleotide
  source 1..717: mol_type = other DNA
atgggctggtcctgcatcatcctgtttctggtggccaccgccaccggcgtgcacagcgacgtcgtgatgacacagtcccccctgtccctgcctgtgaccctgggacagcctgcctccatctcctgcagatcctcccagtccatcctgcactccaacggcaacacctacctggaatggtatcagcagcggcctggccagtcccccagacggctgatctccaaggtgtccaaccggttctctggcgtgcccgacagattctccggctctggctctggcaccgacttcaccctgaagatctcccgggtggaagccgaggacgtgggcgtgtactactgttttcaaggctcccacgtgcccttcaccttcggccagggcaccaagctggaaatcaaacgaactgtggctgcaccatctgtcttcatcttcccgccatctgatgagcagttgaaatctggaactgcctctgttgtgtgcctgctgaataacttctatcccagagaggccaaagtacagtggaaggtggataacgccctccaatcgggtaactcccaggagagtgtcacagagcaggacagcaaggacagcacctacagcctcagcagcaccctgacgctgagcaaagcagactacgagaaacacaaagtctacgcctgcgaagtcacccatcagggcctgagctcgcccgtcacaaagagcttcaacaggggagagtgttga

SEQ ID NO: 585 - DNA, 660 bp, synthetic construct
  misc_feature 1..660: note = Description of Artificial Sequence: Synthetic polynucleotide
  source 1..660: mol_type = other DNA
gacgtcgtgatgacacagtcccccctgtccctgcctgtgaccctgggacagcctgcctccatctcctgcagatcctcccagtccatcctgcactccaacggcaacacctacctggaatggtatcagcagcggcctggccagtcccccagacggctgatctccaaggtgtccaaccggttctctggcgtgcccgacagattctccggctctggctctggcaccgacttcaccctgaagatctcccgggtggaagccgaggacgtgggcgtgtactactgttttcaaggctcccacgtgcccttcaccttcggccagggcaccaagctggaaatcaaacgaactgtggctgcaccatctgtcttcatcttcccgccatctgatgagcagttgaaatctggaactgcctctgttgtgtgcctgctgaataacttctatcccagagaggccaaagtacagtggaaggtggataacgccctccaatcgggtaactcccaggagagtgtcacagagcaggacagcaaggacagcacctacagcctcagcagcaccctgacgctgagcaaagcagactacgagaaacacaaagtctacgcctgcgaagtcacccatcagggcctgagctcgcccgtcacaaagagcttcaacaggggagagtgttga

SEQ ID NO: 586 - protein, 238 aa, synthetic construct
  REGION 1..238: note = Description of Artificial Sequence: Synthetic polypeptide
MGWSCIILFLVATATGVHSDVVMTQSPLSLPVTLGQPASISCRSSQSILHSNGNTYLEWYQQRPGQSPRRLISKVSNRFSGVPDRFSGSGSGTDFTLKISRVEAEDVGVYYCFQGSHVPFTFGQGTKLEIKRTVAAPSVFIFPPSDEQLKSGTASVVCLLNNFYPREAKVQWKVDNALQSGNSQESVTEQDSKDSTYSLSSTLTLSKADYEKHKVYACEVTHQGLSSPVTKSFNRGEC

SEQ ID NO: 587 - protein, 219 aa, synthetic construct
  REGION 1..219: note = Description of Artificial Sequence: Synthetic polypeptide
DVVMTQSPLSLPVTLGQPASISCRSSQSILHSNGNTYLEWYQQRPGQSPRRLISKVSNRFSGVPDRFSGSGSGTDFTLKISRVEAEDVGVYYCFQGSHVPFTFGQGTKLEIKRTVAAPSVFIFPPSDEQLKSGTASVVCLLNNFYPREAKVQWKVDNALQSGNSQESVTEQDSKDSTYSLSSTLTLSKADYEKHKVYACEVTHQGLSSPVTKSFNRGEC

SEQ ID NO: 588 - DNA, 57 bp, synthetic construct; identical to SEQ ID NO: 203
  misc_feature 1..57: note = Description of Artificial Sequence: Synthetic oligonucleotide
  source 1..57: mol_type = other DNA

SEQ ID NO: 589 - DNA, 336 bp, synthetic construct
  misc_feature 1..336: note = Description of Artificial Sequence: Synthetic polynucleotide
  source 1..336: mol_type = other DNA
gacgtcgtgatgacacagtcccccctgtccctgcctgtgaccctgggacagcctgcctccatctcctgcagatcctcccagtccatcctgcactccaacggcaacacctacctggaatggtatcagcagcggcctggccagtcccccagacggctgatctccaaggtgtccaaccggttctctggcgtgcccgacagattctccggctctggctctggcaccgacttcaccctgaagatctcccgggtggaagccgaggacgtgggcgtgtactactgttttcaaggctcccacgtgcccttcaccttcggccagggcaccaagctggaaatcaaa

SEQ ID NO: 590 - protein, 112 aa, synthetic construct
  REGION 1..112: note = Description of Artificial Sequence: Synthetic polypeptide
DVVMTQSPLSLPVTLGQPASISCRSSQSILHSNGNTYLEWYQQRPGQSPRRLISKVSNRFSGVPDRFSGSGSGTDFTLKISRVEAEDVGVYYCFQGSHVPFTFGQGTKLEIK

SEQ ID NO: 591 - DNA, 321 bp, synthetic construct; identical to SEQ ID NO: 421
  misc_feature 1..321: note = Description of Artificial Sequence: Synthetic polynucleotide
  source 1..321: mol_type = other DNA

SEQ ID NO: 592 - protein, 107 aa, synthetic construct [sequence omitted]

SEQ ID NO: 593 - DNA, 15 bp, synthetic construct
  misc_feature 1..15: note = Description of Artificial Sequence: Synthetic oligonucleotide
  source 1..15: mol_type = other DNA
acctactggataacc

SEQ ID NO: 594 - protein, 5 aa, synthetic construct
  REGION 1..5: note = Description of Artificial Sequence: Synthetic peptide
TYWIT

SEQ ID NO: 595 - DNA, 51 bp, synthetic construct
  misc_feature 1..51: note = Description of Artificial Sequence: Synthetic oligonucleotide
  source 1..51: mol_type = other DNA
gatatttatcctggtagtagtatttgtaactacaatgagaagttcaagagc

SEQ ID NO: 596 - protein, 17 aa, synthetic construct
  REGION 1..17: note = Description of Artificial Sequence: Synthetic peptide
DIYPGSSICNYNEKFKS

SEQ ID NO: 597 - DNA, 30 bp, synthetic construct
  misc_feature 1..30: note = Description of Artificial Sequence: Synthetic oligonucleotide
  source 1..30: mol_type = other DNA
gaggatggttacgacgcctggtttgcttac

SEQ ID NO: 598 - protein, 10 aa, synthetic construct
  REGION 1..10: note = Description of Artificial Sequence: Synthetic peptide
EDGYDAWFAY

SEQ ID NO: 599 - DNA, 15 bp, synthetic construct
  misc_feature 1..15: note = Description of Artificial Sequence: Synthetic oligonucleotide
  source 1..15: mol_type = other DNA
acctactggatcacc

SEQ ID NO: 600 - protein, 5 aa, synthetic construct
  REGION 1..5: note = Description of Artificial Sequence: Synthetic peptide
TYWIT

SEQ ID NO: 601 - DNA, 51 bp, synthetic construct
  misc_feature 1..51: note = Description of Artificial Sequence: Synthetic oligonucleotide
  source 1..51: mol_type = other DNA
gacatctaccccggctcctccatctgcaactacaacgagaagttcaagtcc

SEQ ID NO: 602 - protein, 17 aa, synthetic construct
  REGION 1..17: note = Description of Artificial Sequence: Synthetic peptide
DIYPGSSICNYNEKFKS

SEQ ID NO: 603 - DNA, 30 bp, synthetic construct
  misc_feature 1..30: note = Description of Artificial Sequence: Synthetic oligonucleotide
  source 1..30: mol_type = other DNA
gaggacggctacgacgcttggtttgcctac

SEQ ID NO: 604 - protein, 10 aa, synthetic construct
  REGION 1..10: note = Description of Artificial Sequence: Synthetic peptide
EDGYDAWFAY

SEQ ID NO: 605 - DNA, 15 bp, synthetic construct
  misc_feature 1..15: note = Description of Artificial Sequence: Synthetic oligonucleotide
  source 1..15: mol_type = other DNA
acctactggatcacc

SEQ ID NO: 606 - protein, 5 aa, synthetic construct
  REGION 1..5: note = Description of Artificial Sequence: Synthetic peptide
TYWIT

SEQ ID NO: 607 - DNA, 51 bp, synthetic construct; identical to SEQ ID NO: 601
  misc_feature 1..51: note = Description of Artificial Sequence: Synthetic oligonucleotide
  source 1..51: mol_type = other DNA

SEQ ID NO: 608 - protein, 17 aa, synthetic construct
  REGION 1..17: note = Description of Artificial Sequence: Synthetic peptide
DIYPGSSICNYNEKFKS

SEQ ID NO: 609 - DNA, 30 bp, synthetic construct; identical to SEQ ID NO: 603
  misc_feature 1..30: note = Description of Artificial Sequence: Synthetic oligonucleotide
  source 1..30: mol_type = other DNA

SEQ ID NO: 610 - protein, 10 aa, synthetic construct
  REGION 1..10: note = Description of Artificial Sequence: Synthetic peptide
EDGYDAWFAY

SEQ ID NO: 611 - DNA, 15 bp, synthetic construct
  misc_feature 1..15: note = Description of Artificial Sequence: Synthetic oligonucleotide
  source 1..15: mol_type = other DNA
acctactggatcacc

SEQ ID NO: 612 - protein, 5 aa, synthetic construct
  REGION 1..5: note = Description of Artificial Sequence: Synthetic peptide
TYWIT

SEQ ID NO: 613 - DNA, 51 bp, synthetic construct; identical to SEQ ID NO: 601
  misc_feature 1..51: note = Description of Artificial Sequence: Synthetic oligonucleotide
  source 1..51: mol_type = other DNA

SEQ ID NO: 614 - protein, 17 aa, synthetic construct
  REGION 1..17: note = Description of Artificial Sequence: Synthetic peptide
DIYPGSSICNYNEKFKS

SEQ ID NO: 615 - DNA, 30 bp, synthetic construct; identical to SEQ ID NO: 603
  misc_feature 1..30: note = Description of Artificial Sequence: Synthetic oligonucleotide
  source 1..30: mol_type = other DNA

SEQ ID NO: 616 - protein, 10 aa, synthetic construct
  REGION 1..10: note = Description of Artificial Sequence: Synthetic peptide
EDGYDAWFAY

SEQ ID NO: 617 - DNA, 15 bp, synthetic construct
  misc_feature 1..15: note = Description of Artificial Sequence: Synthetic oligonucleotide
  source 1..15: mol_type = other DNA
acctactggatcacc

SEQ ID NO: 618 - protein, 5 aa, synthetic construct
  REGION 1..5: note = Description of Artificial Sequence: Synthetic peptide
TYWIT

SEQ ID NO: 619 - DNA, 51 bp, synthetic construct
  misc_feature 1..51: note = Description of Artificial Sequence: Synthetic oligonucleotide
  source 1..51: mol_type = other DNA
gacatctaccccggctcctccatctgcaactacgcccagaaattccagggc

SEQ ID NO: 620 - protein, 17 aa, synthetic construct
  REGION 1..17: note = Description of Artificial Sequence: Synthetic peptide
DIYPGSSICNYAQKFQG

SEQ ID NO: 621 - DNA, 30 bp, synthetic construct; identical to SEQ ID NO: 603
  misc_feature 1..30: note = Description of Artificial Sequence: Synthetic oligonucleotide
  source 1..30: mol_type = other DNA

SEQ ID NO: 622 - protein, 10 aa, synthetic construct
  REGION 1..10: note = Description of Artificial Sequence: Synthetic peptide
EDGYDAWFAY

SEQ ID NO: 623 - DNA, 15 bp, synthetic construct
  misc_feature 1..15: note = Description of Artificial Sequence: Synthetic oligonucleotide
  source 1..15: mol_type = other DNA
acctactggatcacc

SEQ ID NO: 624 - protein, 5 aa, synthetic construct
  REGION 1..5: note = Description of Artificial Sequence: Synthetic peptide
TYWIT

SEQ ID NO: 625 - DNA, 51 bp, synthetic construct
  misc_feature 1..51: note = Description of Artificial Sequence: Synthetic oligonucleotide
  source 1..51: mol_type = other DNA
gacatctaccccggctcctccatctccaactacaacgagaagttcaagtcc

SEQ ID NO: 626 - protein, 17 aa, synthetic construct
  REGION 1..17: note = Description of Artificial Sequence: Synthetic peptide
DIYPGSSISNYNEKFKS

SEQ ID NO: 627 - DNA, 30 bp, synthetic construct; identical to SEQ ID NO: 603
  misc_feature 1..30: note = Description of Artificial Sequence: Synthetic oligonucleotide
  source 1..30: mol_type = other DNA

SEQ ID NO: 628 - protein, 10 aa, synthetic construct
  REGION 1..10: note = Description of Artificial Sequence: Synthetic peptide
EDGYDAWFAY

SEQ ID NO: 629 - DNA, 15 bp, synthetic construct
  misc_feature 1..15: note = Description of Artificial Sequence: Synthetic oligonucleotide
  source 1..15: mol_type = other DNA
acctactggatcacc

SEQ ID NO: 630 - protein, 5 aa, synthetic construct
  REGION 1..5: note = Description of Artificial Sequence: Synthetic peptide
TYWIT

SEQ ID NO: 631 - DNA, 51 bp, synthetic construct; identical to SEQ ID NO: 625
  misc_feature 1..51: note = Description of Artificial Sequence: Synthetic oligonucleotide
  source 1..51: mol_type = other DNA

SEQ ID NO: 632 - protein, 17 aa, synthetic construct
  REGION 1..17: note = Description of Artificial Sequence: Synthetic peptide
DIYPGSSISNYNEKFKS

SEQ ID NO: 633 - DNA, 30 bp, synthetic construct; identical to SEQ ID NO: 603
  misc_feature 1..30: note = Description of Artificial Sequence: Synthetic oligonucleotide
  source 1..30: mol_type = other DNA

SEQ ID NO: 634 - protein, 10 aa, synthetic construct
  REGION 1..10: note = Description of Artificial Sequence: Synthetic peptide
EDGYDAWFAY

SEQ ID NO: 635 - DNA, 15 bp, synthetic construct
  misc_feature 1..15: note = Description of Artificial Sequence: Synthetic oligonucleotide
  source 1..15: mol_type = other DNA
acctactggatcacc

SEQ ID NO: 636 - protein, 5 aa, synthetic construct
  REGION 1..5: note = Description of Artificial Sequence: Synthetic peptide
TYWIT

SEQ ID NO: 637 - DNA, 51 bp, synthetic construct
  misc_feature 1..51: note = Description of Artificial Sequence: Synthetic oligonucleotide
  source 1..51: mol_type = other DNA
gacatctaccccggctcctccatctccaactacgcccagaagttccagggc

SEQ ID NO: 638 - protein, 17 aa, synthetic construct
  REGION 1..17: note = Description of Artificial Sequence: Synthetic peptide
DIYPGSSISNYAQKFQG

SEQ ID NO: 639 - DNA, 30 bp, synthetic construct; identical to SEQ ID NO: 603
  misc_feature 1..30: note = Description of Artificial Sequence: Synthetic oligonucleotide
  source 1..30: mol_type = other DNA

SEQ ID NO: 640 - protein, 10 aa, synthetic construct
  REGION 1..10: note = Description of Artificial Sequence: Synthetic peptide
EDGYDAWFAY

SEQ ID NO: 641 - DNA, 15 bp, synthetic construct
  misc_feature 1..15: note = Description of Artificial Sequence: Synthetic oligonucleotide
  source 1..15: mol_type = other DNA
acctactggatcacc

SEQ ID NO: 642 - protein, 5 aa, synthetic construct
  REGION 1..5: note = Description of Artificial Sequence: Synthetic peptide
TYWIT

SEQ ID NO: 643 - DNA, 51 bp, synthetic construct; identical to SEQ ID NO: 637
  misc_feature 1..51: note = Description of Artificial Sequence: Synthetic oligonucleotide
  source 1..51: mol_type = other DNA

SEQ ID NO: 644 - protein, 17 aa, synthetic construct
  REGION 1..17: note = Description of Artificial Sequence: Synthetic peptide
DIYPGSSISNYAQKFQG

SEQ ID NO: 645 - DNA, 30 bp, synthetic construct; identical to SEQ ID NO: 603
  misc_feature 1..30: note = Description of Artificial Sequence: Synthetic oligonucleotide
  source 1..30: mol_type = other DNA

SEQ ID NO: 646 - protein, 10 aa, synthetic construct
  REGION 1..10: note = Description of Artificial Sequence: Synthetic peptide
EDGYDAWFAY

SEQ ID NO: 647 - DNA, 15 bp, synthetic construct
  misc_feature 1..15: note = Description of Artificial Sequence: Synthetic oligonucleotide
  source 1..15: mol_type = other DNA
acctactggatcacc

SEQ ID NO: 648 - protein, 5 aa, synthetic construct
  REGION 1..5: note = Description of Artificial Sequence: Synthetic peptide
TYWIT

SEQ ID NO: 649 - DNA, 51 bp, synthetic construct
  misc_feature 1..51: note = Description of Artificial Sequence: Synthetic oligonucleotide
  source 1..51: mol_type = other DNA
gacatctaccccggctcctccatctgcaactacgcccagaagttccagggc

SEQ ID NO: 650 - protein, 17 aa, synthetic construct
  REGION 1..17: note = Description of Artificial Sequence: Synthetic peptide
DIYPGSSICNYAQKFQG

SEQ ID NO: 651 - DNA, 30 bp, synthetic construct; identical to SEQ ID NO: 603
  misc_feature 1..30: note = Description of Artificial Sequence: Synthetic oligonucleotide
  source 1..30: mol_type = other DNA

SEQ ID NO: 652 - protein, 10 aa, synthetic construct
  REGION 1..10: note = Description of Artificial Sequence: Synthetic peptide
EDGYDAWFAY

SEQ ID NO: 653 - DNA, 15 bp, synthetic construct
  misc_feature 1..15: note = Description of Artificial Sequence: Synthetic oligonucleotide
  source 1..15: mol_type = other DNA
acctactggatcacc

SEQ ID NO: 654 - protein, 5 aa, synthetic construct
  REGION 1..5: note = Description of Artificial Sequence: Synthetic peptide
TYWIT

SEQ ID NO: 655 - DNA, 51 bp, synthetic construct; identical to SEQ ID NO: 649
  misc_feature 1..51: note = Description of Artificial Sequence: Synthetic oligonucleotide
  source 1..51: mol_type = other DNA

SEQ ID NO: 656 - protein, 17 aa, synthetic construct
  REGION 1..17: note = Description of Artificial Sequence: Synthetic peptide
DIYPGSSICNYAQKFQG

SEQ ID NO: 657 - DNA, 30 bp, synthetic construct; identical to SEQ ID NO: 603
  misc_feature 1..30: note = Description of Artificial Sequence: Synthetic oligonucleotide
  source 1..30: mol_type = other DNA

SEQ ID NO: 658 - protein, 10 aa, synthetic construct
  REGION 1..10: note = Description of Artificial Sequence: Synthetic peptide
EDGYDAWFAY

SEQ ID NO: 659 - DNA, 15 bp, synthetic construct
  misc_feature 1..15: note = Description of Artificial Sequence: Synthetic oligonucleotide
  source 1..15: mol_type = other DNA
acctactggatcacc

SEQ ID NO: 660 - protein, 5 aa, synthetic construct
  REGION 1..5: note = Description of Artificial Sequence: Synthetic peptide
TYWIT

SEQ ID NO: 661 - DNA, 51 bp, synthetic construct; identical to SEQ ID NO: 601
  misc_feature 1..51: note = Description of Artificial Sequence: Synthetic oligonucleotide
  source 1..51: mol_type = other DNA

SEQ ID NO: 662 - protein, 17 aa, synthetic construct
  REGION 1..17: note = Description of Artificial Sequence: Synthetic peptide
DIYPGSSICNYNEKFKS

SEQ ID NO: 663 - DNA, 30 bp, synthetic construct; identical to SEQ ID NO: 603
  misc_feature 1..30: note = Description of Artificial Sequence: Synthetic oligonucleotide
  source 1..30: mol_type = other DNA

SEQ ID NO: 664 - protein, 10 aa, synthetic construct
  REGION 1..10: note = Description of Artificial Sequence: Synthetic peptide
EDGYDAWFAY

SEQ ID NO: 665 - DNA, 15 bp, synthetic construct
  misc_feature 1..15: note = Description of Artificial Sequence: Synthetic oligonucleotide
  source 1..15: mol_type = other DNA
acctactggatcacc

SEQ ID NO: 666 - protein, 5 aa, synthetic construct
  REGION 1..5: note = Description of Artificial Sequence: Synthetic peptide
TYWIT

SEQ ID NO: 667 - DNA, 51 bp, synthetic construct; identical to SEQ ID NO: 601
  misc_feature 1..51: note = Description of Artificial Sequence: Synthetic oligonucleotide
  source 1..51: mol_type = other DNA

SEQ ID NO: 668 - protein, 17 aa, synthetic construct
  REGION 1..17: note = Description of Artificial Sequence: Synthetic peptide
DIYPGSSICNYNEKFKS

SEQ ID NO: 669 - DNA, 30 bp, synthetic construct
  misc_feature 1..30: note = Description of Artificial Sequence: Synthetic oligonucleotide
  source 1..30: mol_type = other DNA
gaggacggctacgacgcttggtttgcttac

SEQ ID NO: 670 - protein, 10 aa, synthetic construct
  REGION 1..10: note = Description of Artificial Sequence: Synthetic peptide
EDGYDAWFAY

SEQ ID NO: 671 - DNA, 15 bp, synthetic construct
  misc_feature 1..15: note = Description of Artificial Sequence: Synthetic oligonucleotide
  source 1..15: mol_type = other DNA
acctactggatcacc

SEQ ID NO: 672 - protein, 5 aa, synthetic construct
  REGION 1..5: note = Description of Artificial Sequence: Synthetic peptide
TYWIT

SEQ ID NO: 673 - DNA, 51 bp, synthetic construct
  misc_feature 1..51: note = Description of Artificial Sequence: Synthetic oligonucleotide
  source 1..51: mol_type = other DNA
gacatctaccccggctcctccatctgcaactacgccgactccgtcaagggc

SEQ ID NO: 674 - protein, 17 aa, synthetic construct
  REGION 1..17: note = Description of Artificial Sequence: Synthetic peptide
DIYPGSSICNYADSVKG

SEQ ID NO: 675 - DNA, 30 bp, synthetic construct; identical to SEQ ID NO: 669
  misc_feature 1..30: note = Description of Artificial Sequence: Synthetic oligonucleotide
  source 1..30: mol_type = other DNA

SEQ ID NO: 676 - protein, 10 aa, synthetic construct
  REGION 1..10: note = Description of Artificial Sequence: Synthetic peptide
EDGYDAWFAY

SEQ ID NO: 677 - DNA, 15 bp, synthetic construct
  misc_feature 1..15: note = Description of Artificial Sequence: Synthetic oligonucleotide
  source 1..15: mol_type = other DNA
acctactggatcacc

SEQ ID NO: 678 - protein, 5 aa, synthetic construct
  REGION 1..5: note = Description of Artificial Sequence: Synthetic peptide
TYWIT

SEQ ID NO: 679 - DNA, 51 bp, synthetic construct
  misc_feature 1..51: note = Description of Artificial Sequence: Synthetic oligonucleotide
  source 1..51: mol_type = other DNA
gacatctaccccggctcctccatctgcaactacgccgacaagttcaagggc

SEQ ID NO: 680 - protein, 17 aa, synthetic construct
  REGION 1..17: note = Description of Artificial Sequence: Synthetic peptide
DIYPGSSICNYADKFKG

SEQ ID NO: 681 - DNA, 30 bp, synthetic construct; identical to SEQ ID NO: 669
  misc_feature 1..30: note = Description of Artificial Sequence: Synthetic oligonucleotide
  source 1..30: mol_type = other DNA

SEQ ID NO: 682 - protein, 10 aa, synthetic construct
  REGION 1..10: note = Description of Artificial Sequence: Synthetic peptide
EDGYDAWFAY

SEQ ID NO: 683 - DNA, 15 bp, synthetic construct
  misc_feature 1..15: note = Description of Artificial Sequence: Synthetic oligonucleotide
  source 1..15: mol_type = other DNA
acctactggatcacc

SEQ ID NO: 684 - protein, 5 aa, synthetic construct
  REGION 1..5: note = Description of Artificial Sequence: Synthetic peptide
TYWIT

SEQ ID NO: 685 - DNA, 51 bp, synthetic construct; identical to SEQ ID NO: 601
  misc_feature 1..51: note = Description of Artificial Sequence: Synthetic oligonucleotide
  source 1..51: mol_type = other DNA

SEQ ID NO: 686 - protein, 17 aa, synthetic construct
  REGION 1..17: note = Description of Artificial Sequence: Synthetic peptide
DIYPGSSICNYNEKFKS

SEQ ID NO: 687 - DNA, 30 bp, synthetic construct; identical to SEQ ID NO: 669
  misc_feature 1..30: note = Description of Artificial Sequence: Synthetic oligonucleotide
  source 1..30: mol_type = other DNA

SEQ ID NO: 688 - protein, 10 aa, synthetic construct
  REGION 1..10: note = Description of Artificial Sequence: Synthetic peptide
EDGYDAWFAY

SEQ ID NO: 689 - DNA, 15 bp, synthetic construct
  misc_feature 1..15: note = Description of Artificial Sequence: Synthetic oligonucleotide
  source 1..15: mol_type = other DNA
acctactggatcacc

SEQ ID NO: 690 - protein, 5 aa, synthetic construct
  REGION 1..5: note = Description of Artificial Sequence: Synthetic peptide
TYWIT

SEQ ID NO: 691 - DNA, 51 bp, synthetic construct; identical to SEQ ID NO: 601
  misc_feature 1..51: note = Description of Artificial Sequence: Synthetic oligonucleotide
  source 1..51: mol_type = other DNA

SEQ ID NO: 692 - protein, 17 aa, synthetic construct
  REGION 1..17: note = Description of Artificial Sequence: Synthetic peptide
DIYPGSSICNYNEKFKS

SEQ ID NO: 693 - DNA, 30 bp, synthetic construct; identical to SEQ ID NO: 669
  misc_feature 1..30: note = Description of Artificial Sequence: Synthetic oligonucleotide
  source 1..30: mol_type = other DNA

SEQ ID NO: 694 - protein, 10 aa, synthetic construct
  REGION 1..10: note = Description of Artificial Sequence: Synthetic peptide
EDGYDAWFAY

SEQ ID NO: 695 - DNA, 15 bp, synthetic construct
  misc_feature 1..15: note = Description of Artificial Sequence: Synthetic oligonucleotide
  source 1..15: mol_type = other DNA
acctactggatcacc

SEQ ID NO: 696 - protein, 5 aa, synthetic construct
  REGION 1..5: note = Description of Artificial Sequence: Synthetic peptide
TYWIT

SEQ ID NO: 697 - DNA, 51 bp, synthetic construct; identical to SEQ ID NO: 601
  misc_feature 1..51: note = Description of Artificial Sequence: Synthetic oligonucleotide
  source 1..51: mol_type = other DNA

SEQ ID NO: 698 - protein, 17 aa, synthetic construct
  REGION 1..17: note = Description of Artificial Sequence: Synthetic peptide
DIYPGSSICNYNEKFKS

SEQ ID NO: 699 - DNA, 30 bp, synthetic construct; identical to SEQ ID NO: 669
  misc_feature 1..30: note = Description of Artificial Sequence: Synthetic oligonucleotide
  source 1..30: mol_type = other DNA

SEQ ID NO: 700 - protein, 10 aa, synthetic construct
  REGION 1..10: note = Description of Artificial Sequence: Synthetic peptide
EDGYDAWFAY

SEQ ID NO: 701 - DNA, 15 bp, synthetic construct
  misc_feature 1..15: note = Description of Artificial Sequence: Synthetic oligonucleotide
  source 1..15: mol_type = other DNA
acctactggatcacc

SEQ ID NO: 702 - protein, 5 aa, synthetic construct
  REGION 1..5: note = Description of Artificial Sequence: Synthetic peptide
TYWIT

SEQ ID NO: 703 - DNA, 51 bp, synthetic construct; identical to SEQ ID NO: 601
  misc_feature 1..51: note = Description of Artificial Sequence: Synthetic oligonucleotide
  source 1..51: mol_type = other DNA

SEQ ID NO: 704 - protein, 17 aa, synthetic construct
  REGION 1..17: note = Description of Artificial Sequence: Synthetic peptide
DIYPGSSICNYNEKFKS

SEQ ID NO: 705 - DNA, 30 bp, synthetic construct; identical to SEQ ID NO: 669
  misc_feature 1..30: note = Description of Artificial Sequence: Synthetic oligonucleotide
  source 1..30: mol_type = other DNA

SEQ ID NO: 706 - protein, 10 aa, synthetic construct
  REGION 1..10: note = Description of Artificial Sequence: Synthetic peptide
EDGYDAWFAY

SEQ ID NO: 707 - DNA, 15 bp, synthetic construct
  misc_feature 1..15: note = Description of Artificial Sequence: Synthetic oligonucleotide
  source 1..15: mol_type = other DNA
acctactggatcacc

SEQ ID NO: 708 - protein, 5 aa, synthetic construct
  REGION 1..5: note = Description of Artificial Sequence: Synthetic peptide
TYWIT

SEQ ID NO: 709 - DNA, 51 bp, synthetic construct; identical to SEQ ID NO: 679
  misc_feature 1..51: note = Description of Artificial Sequence: Synthetic oligonucleotide
  source 1..51: mol_type = other DNA

SEQ ID NO: 710 - protein, 17 aa, synthetic construct
  REGION 1..17: note = Description of Artificial Sequence: Synthetic peptide
DIYPGSSICNYADKFKG

SEQ ID NO: 711 - DNA, 30 bp, synthetic construct; identical to SEQ ID NO: 669
  misc_feature 1..30: note = Description of Artificial Sequence: Synthetic oligonucleotide
  source 1..30: mol_type = other DNA

SEQ ID NO: 712 - protein, 10 aa, synthetic construct
  REGION 1..10: note = Description of Artificial Sequence: Synthetic peptide
EDGYDAWFAY

SEQ ID NO: 713 - DNA, 15 bp, synthetic construct
  misc_feature 1..15: note = Description of Artificial Sequence: Synthetic oligonucleotide
  source 1..15: mol_type = other DNA
acctactggatcacc

SEQ ID NO: 714 - protein, 5 aa, synthetic construct
  REGION 1..5: note = Description of Artificial Sequence: Synthetic peptide
TYWIT

SEQ ID NO: 715 - DNA, 51 bp, synthetic construct; identical to SEQ ID NO: 679
  misc_feature 1..51: note = Description of Artificial Sequence: Synthetic oligonucleotide
  source 1..51: mol_type = other DNA

SEQ ID NO: 716 - protein, 17 aa, synthetic construct
  REGION 1..17: note = Description of Artificial Sequence: Synthetic peptide
DIYPGSSICNYADKFKG

SEQ ID NO: 717 - DNA, 30 bp, synthetic construct; identical to SEQ ID NO: 669
  misc_feature 1..30: note = Description of Artificial Sequence: Synthetic oligonucleotide
  source 1..30: mol_type = other DNA

SEQ ID NO: 718 - protein, 10 aa, synthetic construct
  REGION 1..10: note = Description of Artificial Sequence: Synthetic peptide
EDGYDAWFAY

SEQ ID NO: 719 - DNA, 15 bp, synthetic construct
  misc_feature 1..15: note = Description of Artificial Sequence: Synthetic oligonucleotide
  source 1..15: mol_type = other DNA
acctactggatcacc

SEQ ID NO: 720 - protein, 5 aa, synthetic construct
  REGION 1..5: note = Description of Artificial Sequence: Synthetic peptide
TYWIT

SEQ ID NO: 721 - DNA, 51 bp, synthetic construct
  misc_feature 1..51: note = Description of Artificial Sequence: Synthetic oligonucleotide
  source 1..51: mol_type = other DNA
gacatctaccccggctcctccatctccaactacgccgactccgtcaagggc

SEQ ID NO: 722 - protein, 17 aa, synthetic construct
  REGION 1..17: note = Description of Artificial Sequence: Synthetic peptide
DIYPGSSISNYADSVKG

SEQ ID NO: 723 - DNA, 30 bp, synthetic construct; identical to SEQ ID NO: 603
  misc_feature 1..30: note = Description of Artificial Sequence: Synthetic oligonucleotide
  source 1..30: mol_type = other DNA

SEQ ID NO: 724 - protein, 10 aa, synthetic construct
  REGION 1..10: note = Description of Artificial Sequence: Synthetic peptide
EDGYDAWFAY

SEQ ID NO: 725 - DNA, 15 bp, synthetic construct
  misc_feature 1..15: note = Description of Artificial Sequence: Synthetic oligonucleotide
  source 1..15: mol_type = other DNA
acctactggatcacc

SEQ ID NO: 726 - protein, 5 aa, synthetic construct
  REGION 1..5: note = Description of Artificial Sequence: Synthetic peptide
TYWIT

SEQ ID NO: 727 - DNA, 51 bp, synthetic construct; identical to SEQ ID NO: 625
  misc_feature 1..51: note = Description of Artificial Sequence: Synthetic oligonucleotide
  source 1..51: mol_type = other DNA

SEQ ID NO: 728 - protein, 17 aa, synthetic construct
  REGION 1..17: note = Description of Artificial Sequence: Synthetic peptide
DIYPGSSISNYNEKFKS

SEQ ID NO: 729 - DNA, 30 bp, synthetic construct; identical to SEQ ID NO: 603
  misc_feature 1..30: note = Description of Artificial Sequence: Synthetic oligonucleotide
  source 1..30: mol_type = other DNA

SEQ ID NO: 730 - protein, 10 aa, synthetic construct
  REGION 1..10: note = Description of Artificial Sequence: Synthetic peptide
EDGYDAWFAY

SEQ ID NO: 731 - DNA, 15 bp, synthetic construct
  misc_feature 1..15: note = Description of Artificial Sequence: Synthetic oligonucleotide
  source 1..15: mol_type = other DNA
acctactggatcacc

SEQ ID NO: 732 - protein, 5 aa, synthetic construct
  REGION 1..5: note = Description of Artificial Sequence: Synthetic peptide
TYWIT

SEQ ID NO: 733 - DNA, 51 bp, synthetic construct; identical to SEQ ID NO: 625
  misc_feature 1..51: note = Description of Artificial Sequence: Synthetic oligonucleotide
  source 1..51: mol_type = other DNA

SEQ ID NO: 734 - protein, 17 aa, synthetic construct
  REGION 1..17: note = Description of Artificial Sequence: Synthetic peptide
DIYPGSSISNYNEKFKS

SEQ ID NO: 735 - DNA, 30 bp, synthetic construct; identical to SEQ ID NO: 669
  misc_feature 1..30: note = Description of Artificial Sequence: Synthetic oligonucleotide
  source 1..30: mol_type = other DNA

SEQ ID NO: 736 - protein, 10 aa, synthetic construct
  REGION 1..10: note = Description of Artificial Sequence: Synthetic peptide
EDGYDAWFAY

SEQ ID NO: 737 - DNA, 48 bp, synthetic construct
  misc_feature 1..48: note = Description of Artificial Sequence: Synthetic oligonucleotide
  source 1..48: mol_type = other DNA
agatctagtcagagcattttacatagtaatggaaacacctatttagaa

SEQ ID NO: 738 - protein, 16 aa, synthetic construct
  REGION 1..16: note = Description of Artificial Sequence: Synthetic peptide
RSSQSILHSNGNTYLE

SEQ ID NO: 739 - DNA, 21 bp, synthetic construct
  misc_feature 1..21: note = Description of Artificial Sequence: Synthetic oligonucleotide
  source 1..21: mol_type = other DNA
aaagtttccaaccgattttct

SEQ ID NO: 740 - protein, 7 aa, synthetic construct
  REGION 1..7: note = Description of Artificial Sequence: Synthetic peptide
KVSNRFS

SEQ ID NO: 741 - DNA, 27 bp, synthetic construct
  misc_feature 1..27: note = Description of Artificial Sequence: Synthetic oligonucleotide
  source 1..27: mol_type = other DNA
tttcaaggttcacatgttccattcacg

SEQ ID NO: 742 - protein, 9 aa, synthetic construct
  REGION 1..9: note = Description of Artificial Sequence: Synthetic peptide
FQGSHVPFT

SEQ ID NO: 743 - DNA, 48 bp, synthetic construct
  misc_feature 1..48: note = Description of Artificial Sequence: Synthetic oligonucleotide
  source 1..48: mol_type = other DNA
agatcctcccagtccatcctgcactccaacggcaacacctacctggaa

SEQ ID NO: 744 - protein, 16 aa, synthetic construct
  REGION 1..16: note = Description of Artificial Sequence: Synthetic peptide
RSSQSILHSNGNTYLE

SEQ ID NO: 745 - DNA, 21 bp, synthetic construct
  misc_feature 1..21: note = Description of Artificial Sequence: Synthetic oligonucleotide
  source 1..21: mol_type = other DNA
aaggtgtccaaccggttctcc

SEQ ID NO: 746 - protein, 7 aa, synthetic construct
  REGION 1..7: note = Description of Artificial Sequence: Synthetic peptide
KVSNRFS

SEQ ID NO: 747 - DNA, 27 bp, synthetic construct
  misc_feature 1..27: note = Description of Artificial Sequence: Synthetic oligonucleotide
  source 1..27: mol_type = other DNA
tttcaaggctcccacgtgcccttcacc

SEQ ID NO: 748 - protein, 9 aa, synthetic construct
  REGION 1..9: note = Description of Artificial Sequence: Synthetic peptide
FQGSHVPFT

SEQ ID NO: 749 - DNA, 48 bp, synthetic construct; identical to SEQ ID NO: 743
  misc_feature 1..48: note = Description of Artificial Sequence: Synthetic oligonucleotide
  source 1..48: mol_type = other DNA

SEQ ID NO: 750 - protein, 16 aa, synthetic construct
  REGION 1..16: note = Description of Artificial Sequence: Synthetic peptide
RSSQSILHSNGNTYLE

SEQ ID NO: 751 - DNA, 21 bp, synthetic construct
  misc_feature 1..21: note = Description of Artificial Sequence: Synthetic oligonucleotide
  source 1..21: mol_type = other DNA
aaggtgtccaaccggttctcc

SEQ ID NO: 752 - protein, 7 aa, synthetic construct
  REGION 1..7: note = Description of Artificial Sequence: Synthetic peptide
KVSNRFS

SEQ ID NO: 753 - DNA, 27 bp, synthetic construct
  misc_feature 1..27: note = Description of Artificial Sequence: Synthetic oligonucleotide
  source 1..27: mol_type = other DNA
tttcaaggctcccacgtgcccttcacc

SEQ ID NO: 754 - protein, 9 aa, synthetic construct
  REGION 1..9: note = Description of Artificial Sequence: Synthetic peptide
FQGSHVPFT

SEQ ID NO: 755 - DNA, 48 bp, synthetic construct; identical to SEQ ID NO: 743
  misc_feature 1..48: note = Description of Artificial Sequence: Synthetic oligonucleotide
  source 1..48: mol_type = other DNA

SEQ ID NO: 756 - protein, 16 aa, synthetic construct
  REGION 1..16: note = Description of Artificial Sequence: Synthetic peptide
RSSQSILHSNGNTYLE

SEQ ID NO: 757 - DNA, 21 bp, synthetic construct
  misc_feature 1..21: note = Description of Artificial Sequence: Synthetic oligonucleotide
  source 1..21: mol_type = other DNA
aaggtgtccaaccggttctcc

SEQ ID NO: 758 - protein, 7 aa, synthetic construct
  REGION 1..7: note = Description of Artificial Sequence: Synthetic peptide
KVSNRFS

SEQ ID NO: 759 - DNA, 27 bp, synthetic construct
  misc_feature 1..27: note = Description of Artificial Sequence: Synthetic oligonucleotide
  source 1..27: mol_type = other DNA
tttcaaggctcccacgtgcccttcacc

SEQ ID NO: 760 - protein, 9 aa, synthetic construct
  REGION 1..9: note = Description of Artificial Sequence: Synthetic peptide
FQGSHVPFT

SEQ ID NO: 761 - DNA, 48 bp, synthetic construct; identical to SEQ ID NO: 743
  misc_feature 1..48: note = Description of Artificial Sequence: Synthetic oligonucleotide
  source 1..48: mol_type = other DNA

SEQ ID NO: 762 - protein, 16 aa, synthetic construct
  REGION 1..16: note = Description of Artificial Sequence: Synthetic peptide
RSSQSILHSNGNTYLE

SEQ ID NO: 763 - DNA, 21 bp, synthetic construct
  misc_feature 1..21: note = Description of Artificial Sequence: Synthetic oligonucleotide
  source 1..21: mol_type = other DNA
aaggtgtccaaccggttctct

SEQ ID NO: 764 - protein, 7 aa, synthetic construct
  REGION 1..7: note = Description of Artificial Sequence: Synthetic peptide
KVSNRFS

SEQ ID NO: 765 - DNA, 27 bp, synthetic construct
  misc_feature 1..27: note = Description of Artificial Sequence: Synthetic oligonucleotide
  source 1..27: mol_type = other DNA
tttcaaggctcccacgtgcccttcacc

SEQ ID NO: 766 - protein, 9 aa, synthetic construct
  REGION 1..9: note = Description of Artificial Sequence: Synthetic peptide
FQGSHVPFT

SEQ ID NO: 767 - DNA, 48 bp, synthetic construct; identical to SEQ ID NO: 743
  misc_feature 1..48: note = Description of Artificial Sequence: Synthetic oligonucleotide
  source 1..48: mol_type = other DNA

SEQ ID NO: 768 - protein, 16 aa, synthetic construct
  REGION 1..16: note = Description of Artificial Sequence: Synthetic peptide
RSSQSILHSNGNTYLE

SEQ ID NO: 769 - DNA, 21 bp, synthetic construct
  misc_feature 1..21: note = Description of Artificial Sequence: Synthetic oligonucleotide
  source 1..21: mol_type = other DNA
aaggtgtccaaccggttctcc

SEQ ID NO: 770 - protein, 7 aa, synthetic construct
  REGION 1..7: note = Description of Artificial Sequence: Synthetic peptide
KVSNRFS

SEQ ID NO: 771 - DNA, 27 bp, synthetic construct
  misc_feature 1..27: note = Description of Artificial Sequence: Synthetic oligonucleotide
  source 1..27: mol_type = other DNA
tttcaaggctcccacgtgcccttcacc

SEQ ID NO: 772 - protein, 9 aa, synthetic construct
  REGION 1..9: note = Description of Artificial Sequence: Synthetic peptide
FQGSHVPFT

SEQ ID NO: 773 - DNA, 48 bp, synthetic construct; identical to SEQ ID NO: 743
  misc_feature 1..48: note = Description of Artificial Sequence: Synthetic oligonucleotide
  source 1..48: mol_type = other DNA

SEQ ID NO: 774 - protein, 16 aa, synthetic construct
  REGION 1..16: note = Description of Artificial Sequence: Synthetic peptide
RSSQSILHSNGNTYLE

SEQ ID NO: 775 - DNA, 21 bp, synthetic construct
  misc_feature 1..21: note = Description of Artificial Sequence: Synthetic oligonucleotide
  source 1..21: mol_type = other DNA
aaggtgtccaaccggttctcc

SEQ ID NO: 776 - protein, 7 aa, synthetic construct
  REGION 1..7: note = Description of Artificial Sequence: Synthetic peptide
KVSNRFS

SEQ ID NO: 777 - DNA, 27 bp, synthetic construct
  misc_feature 1..27: note = Description of Artificial Sequence: Synthetic oligonucleotide
  source 1..27: mol_type = other DNA
tttcaaggctcccacgtgcccttcacc

SEQ ID NO: 778 - protein, 9 aa, synthetic construct
  REGION 1..9: note = Description of Artificial Sequence: Synthetic peptide
FQGSHVPFT

SEQ ID NO: 779 - DNA, 48 bp, synthetic construct; identical to SEQ ID NO: 743
  misc_feature 1..48: note = Description of Artificial Sequence: Synthetic oligonucleotide
  source 1..48: mol_type = other DNA

SEQ ID NO: 780 - protein, 16 aa, synthetic construct
  REGION 1..16: note = Description of Artificial Sequence: Synthetic peptide
RSSQSILHSNGNTYLE

SEQ ID NO: 781 - DNA, 21 bp, synthetic construct
  misc_feature 1..21: note = Description of Artificial Sequence: Synthetic oligonucleotide
  source 1..21: mol_type = other DNA
aaggtgtccaaccggttctcc

SEQ ID NO: 782 - protein, 7 aa, synthetic construct
  REGION 1..7: note = Description of Artificial Sequence: Synthetic peptide
KVSNRFS

SEQ ID NO: 783 - DNA, 27 bp, synthetic construct
  misc_feature 1..27: note = Description of Artificial Sequence: Synthetic oligonucleotide
  source 1..27: mol_type = other DNA
tttcaaggctcccacgtgcccttcacc

SEQ ID NO: 784 - protein, 9 aa, synthetic construct
  REGION 1..9: note = Description of Artificial Sequence: Synthetic peptide
FQGSHVPFT

SEQ ID NO: 785 - DNA, 48 bp, synthetic construct
  misc_feature 1..48: note = Description of Artificial Sequence: Synthetic oligonucleotide
  source 1..48: mol_type = other DNA
agatcctcccagtccatcgtgcactccaacggcaacacctacctggaa

SEQ ID NO: 786 - protein, 16 aa, synthetic construct
  REGION 1..16: note = Description of Artificial Sequence: Synthetic peptide
RSSQSIVHSNGNTYLE

SEQ ID NO: 787 - DNA, 21 bp, synthetic construct
  misc_feature 1..21: note = Description of Artificial Sequence: Synthetic oligonucleotide
  source 1..21: mol_type = other DNA
aaggtgtccaaccggttctcc

SEQ ID NO: 788 - protein, 7 aa, synthetic construct
  REGION 1..7: note = Description of Artificial Sequence: Synthetic peptide
KVSNRFS

SEQ ID NO: 789 - DNA, 27 bp, synthetic construct
  misc_feature 1..27: note = Description of Artificial Sequence: Synthetic oligonucleotide
  source 1..27: mol_type = other DNA
tttcaaggctcccacgtgcccttcacc

SEQ ID NO: 790 - protein, 9 aa, synthetic construct
  REGION 1..9: note = Description of Artificial Sequence: Synthetic peptide
FQGSHVPFT

SEQ ID NO: 791 - DNA, 48 bp, synthetic construct
  misc_feature 1..48: note = Description of Artificial Sequence: Synthetic oligonucleotide
  source 1..48: mol_type = other DNA
agatcctcccagtccatcgtgcactccaacggcaacacctacctgaac

SEQ ID NO: 792 - protein, 16 aa, synthetic construct
  REGION 1..16: note = Description of Artificial Sequence: Synthetic peptide
RSSQSIVHSNGNTYLN

SEQ ID NO: 793 - DNA, 21 bp, synthetic construct
  misc_feature 1..21: note = Description of Artificial Sequence: Synthetic oligonucleotide
  source 1..21: mol_type = other DNA
aaggtgtccaaccggttctcc

SEQ ID NO: 794 - protein, 7 aa, synthetic construct
  REGION 1..7: note = Description of Artificial Sequence: Synthetic peptide
KVSNRFS

SEQ ID NO: 795 - DNA, 27 bp, synthetic construct
  misc_feature 1..27: note = Description of Artificial Sequence: Synthetic oligonucleotide
  source 1..27: mol_type = other DNA
tttcaaggctcccacgtgcccttcacc

SEQ ID NO: 796 - protein, 9 aa, synthetic construct
  REGION 1..9: note = Description of Artificial Sequence: Synthetic peptide
FQGSHVPFT

SEQ ID NO: 797 - DNA, 48 bp, synthetic construct; identical to SEQ ID NO: 785
  misc_feature 1..48: note = Description of Artificial Sequence: Synthetic oligonucleotide
  source 1..48: mol_type = other DNA

SEQ ID NO: 798 - protein, 16 aa, synthetic construct
  REGION 1..16: note = Description of Artificial Sequence: Synthetic peptide
RSSQSIVHSNGNTYLE

SEQ ID NO: 799 - DNA, 21 bp, synthetic construct
  misc_feature 1..21: note = Description of Artificial Sequence: Synthetic oligonucleotide
  source 1..21: mol_type = other DNA
aaggtgtccaaccggttctcc

SEQ ID NO: 800 - protein, 7 aa, synthetic construct
  REGION 1..7: note = Description of Artificial Sequence: Synthetic peptide
KVSNRFS

SEQ ID NO: 801 - DNA, 27 bp, synthetic construct
  misc_feature 1..27: note = Description of Artificial Sequence: Synthetic oligonucleotide
  source 1..27: mol_type = other DNA
tttcaaggctcccacgtgcccttcacc

SEQ ID NO: 802 - protein, 9 aa, synthetic construct
  REGION 1..9: note = Description of Artificial Sequence: Synthetic peptide
FQGSHVPFT

SEQ ID NO: 803 - DNA, 48 bp, synthetic construct
  misc_feature 1..48: note = Description of Artificial Sequence: Synthetic oligonucleotide
  source 1..48: mol_type = other DNA
cggtcctcccagtccatcctgcactccaacggcaacacctacctggaa

SEQ ID NO: 804 - protein, 16 aa, synthetic construct
  REGION 1..16: note = Description of Artificial Sequence: Synthetic peptide
RSSQSILHSNGNTYLE

SEQ ID NO: 805 - DNA, 21 bp, synthetic construct
  misc_feature 1..21: note = Description of Artificial Sequence: Synthetic oligonucleotide
  source 1..21: mol_type = other DNA
aaggtgtccaaccggttctcc

SEQ ID NO: 806 - protein, 7 aa, synthetic construct
  REGION 1..7: note = Description of Artificial Sequence: Synthetic peptide
KVSNRFS

SEQ ID NO: 807 - DNA, 27 bp, synthetic construct
  misc_feature 1..27: note = Description of Artificial Sequence: Synthetic oligonucleotide
  source 1..27: mol_type = other DNA
tttcaaggctcccacgtgcccttcacc

SEQ ID NO: 808 - protein, 9 aa, synthetic construct
  REGION 1..9: note = Description of Artificial Sequence: Synthetic peptide
FQGSHVPFT

SEQ ID NO: 809 - DNA, 48 bp, synthetic construct; identical to SEQ ID NO: 803
  misc_feature 1..48: note = Description of Artificial Sequence: Synthetic oligonucleotide
  source 1..48: mol_type = other DNA

SEQ ID NO: 810 - protein, 16 aa, synthetic construct
  REGION 1..16: note = Description of Artificial Sequence: Synthetic peptide
RSSQSILHSNGNTYLE

SEQ ID NO: 811 - DNA, 21 bp, synthetic construct
  misc_feature 1..21: note = Description of Artificial Sequence: Synthetic oligonucleotide
  source 1..21: mol_type = other DNA
aaggtgtccaaccggttctcc

SEQ ID NO: 812 - protein, 7 aa, synthetic construct
  REGION 1..7: note = Description of Artificial Sequence: Synthetic peptide
KVSNRFS

SEQ ID NO: 813 - DNA, 27 bp, synthetic construct
  misc_feature 1..27: note = Description of Artificial Sequence: Synthetic oligonucleotide
  source 1..27: mol_type = other DNA
tttcaaggctcccacgtgcccttcacc

SEQ ID NO: 814 - protein, 9 aa, synthetic construct
  REGION 1..9: note = Description of Artificial Sequence: Synthetic peptide
FQGSHVPFT

SEQ ID NO: 815 - DNA, 48 bp, synthetic construct; identical to SEQ ID NO: 803
  misc_feature 1..48: note = Description of Artificial Sequence: Synthetic oligonucleotide
  source 1..48: mol_type = other DNA

SEQ ID NO: 816 - protein, 16 aa, synthetic construct
  REGION 1..16: note = Description of Artificial Sequence: Synthetic peptide
RSSQSILHSNGNTYLE

SEQ ID NO: 817 - DNA, 21 bp, synthetic construct
  misc_feature 1..21: note = Description of Artificial Sequence: Synthetic oligonucleotide
  source 1..21: mol_type = other DNA
aaggtgtccaaccggttctcc

SEQ ID NO: 818 - protein, 7 aa, synthetic construct
  REGION 1..7: note = Description of Artificial Sequence: Synthetic peptide
KVSNRFS

SEQ ID NO: 819 - DNA, 27 bp, synthetic construct
  misc_feature 1..27: note = Description of Artificial Sequence: Synthetic oligonucleotide
  source 1..27: mol_type = other DNA
tttcaaggctcccacgtgcccttcacc

SEQ ID NO: 820 - protein, 9 aa, synthetic construct
  REGION 1..9: note = Description of Artificial Sequence: Synthetic peptide
FQGSHVPFT

SEQ ID NO: 821 - DNA, 48 bp, synthetic construct; identical to SEQ ID NO: 803
  misc_feature 1..48: note = Description of Artificial Sequence: Synthetic oligonucleotide
  source 1..48: mol_type = other DNA

SEQ ID NO: 822 - protein, 16 aa, synthetic construct
  REGION 1..16: note = Description of Artificial Sequence: Synthetic peptide
RSSQSILHSNGNTYLE

SEQ ID NO: 823 - DNA, 21 bp, synthetic construct
  misc_feature 1..21: note = Description of Artificial Sequence: Synthetic oligonucleotide
  source 1..21: mol_type = other DNA
aaggtgtccaaccggttctcc

SEQ ID NO: 824 - protein, 7 aa, synthetic construct
  REGION 1..7: note = Description of Artificial Sequence: Synthetic peptide
KVSNRFS

SEQ ID NO: 825 - DNA, 27 bp, synthetic construct
  misc_feature 1..27: note = Description of Artificial Sequence: Synthetic oligonucleotide
  source 1..27: mol_type = other DNA
tttcaaggctcccacgtgcccttcacc

SEQ ID NO: 826 - protein, 9 aa, synthetic construct
  REGION 1..9: note = Description of Artificial Sequence: Synthetic peptide
FQGSHVPFT

SEQ ID NO: 827 - DNA, 48 bp, synthetic construct; identical to SEQ ID NO: 803
  misc_feature 1..48: note = Description of Artificial Sequence: Synthetic oligonucleotide
  source 1..48: mol_type = other DNA

SEQ ID NO: 828 - protein, 16 aa, synthetic construct
  REGION 1..16: note = Description of Artificial Sequence: Synthetic peptide
RSSQSILHSNGNTYLE

SEQ ID NO: 829 - DNA, 21 bp, synthetic construct
  misc_feature 1..21: note = Description of Artificial Sequence: Synthetic oligonucleotide
  source 1..21: mol_type = other DNA
aaggtgtccaaccggttctcc

SEQ ID NO: 830 - protein, 7 aa, synthetic construct
  REGION 1..7: note = Description of Artificial Sequence: Synthetic peptide
KVSNRFS

SEQ ID NO: 831 - DNA, 27 bp, synthetic construct
  misc_feature 1..27: note = Description of Artificial Sequence: Synthetic oligonucleotide
  source 1..27: mol_type = other DNA
tttcaaggctcccacgtgcccttcacc

SEQ ID NO: 832 - protein, 9 aa, synthetic construct
  REGION 1..9: note = Description of Artificial Sequence: Synthetic peptide
FQGSHVPFT

SEQ ID NO: 833 - DNA, 48 bp, synthetic construct
  misc_feature 1..48: note = Description of Artificial Sequence: Synthetic oligonucleotide
  source 1..48: mol_type = other DNA
cggtcctcccagtccatcgtgcactccaacggcaacacctacctggaa

SEQ ID NO: 834 - protein, 16 aa, synthetic construct
  REGION 1..16: note = Description of Artificial Sequence: Synthetic peptide
RSSQSIVHSNGNTYLE

SEQ ID NO: 835 - DNA, 21 bp, synthetic construct
  misc_feature 1..21: note = Description of Artificial Sequence: Synthetic oligonucleotide
  source 1..21: mol_type = other DNA
aaggtgtccaaccggttctcc

SEQ ID NO: 836 - protein, 7 aa, synthetic construct
  REGION 1..7: note = Description of Artificial Sequence: Synthetic peptide
KVSNRFS

SEQ ID NO: 837 - DNA, 27 bp, synthetic construct
  misc_feature 1..27: note = Description of Artificial Sequence: Synthetic oligonucleotide
  source 1..27: mol_type = other DNA
tttcaaggctcccacgtgcccttcacc

SEQ ID NO: 838 - protein, 9 aa, synthetic construct
  REGION 1..9: note = Description of Artificial Sequence: Synthetic peptide
FQGSHVPFT

SEQ ID NO: 839 - DNA, 48 bp, synthetic construct
  misc_feature 1..48: note = Description of Artificial Sequence: Synthetic oligonucleotide
  source 1..48: mol_type = other DNA
cggtcctcccagtccatcgtgcactccaacggcaacacctacctgaac

SEQ ID NO: 840 - protein, 16 aa, synthetic construct
  REGION 1..16: note = Description of Artificial Sequence: Synthetic peptide
RSSQSIVHSNGNTYLN

SEQ ID NO: 841 - DNA, 21 bp, synthetic construct
  misc_feature 1..21: note = Description of Artificial Sequence: Synthetic oligonucleotide
  source 1..21: mol_type = other DNA
aaggtgtccaaccggttctcc

SEQ ID NO: 842 - protein, 7 aa, synthetic construct
  REGION 1..7: note = Description of Artificial Sequence: Synthetic peptide
KVSNRFS

SEQ ID NO: 843 - DNA, 27 bp, synthetic construct
  misc_feature 1..27: note = Description of Artificial Sequence: Synthetic oligonucleotide
  source 1..27: mol_type = other DNA
tttcaaggctcccacgtgcccttcacc

SEQ ID NO: 844 - protein, 9 aa, synthetic construct
  REGION 1..9: note = Description of Artificial Sequence: Synthetic peptide
FQGSHVPFT

SEQ ID NO: 845 - DNA, 48 bp, synthetic construct; identical to SEQ ID NO: 803
  misc_feature 1..48: note = Description of Artificial Sequence: Synthetic oligonucleotide
  source 1..48: mol_type = other DNA

SEQ ID NO: 846 - protein, 16 aa, synthetic construct
  REGION 1..16: note = Description of Artificial Sequence: Synthetic peptide
RSSQSILHSNGNTYLE

SEQ ID NO: 847 - DNA, 21 bp, synthetic construct
  misc_feature 1..21: note = Description of Artificial Sequence: Synthetic oligonucleotide
  source 1..21: mol_type = other DNA
aaggtgtccaaccggttctcc

SEQ ID NO: 848 - protein, 7 aa, synthetic construct
  REGION 1..7: note = Description of Artificial Sequence: Synthetic peptide
KVSNRFS

SEQ ID NO: 849 - DNA, 27 bp, synthetic construct
  misc_feature 1..27: note = Description of Artificial Sequence: Synthetic oligonucleotide
  source 1..27: mol_type = other DNA
tttcaaggctcccacgtgcccttcacc

SEQ ID NO: 850 - protein, 9 aa, synthetic construct
  REGION 1..9: note = Description of Artificial Sequence: Synthetic peptide
FQGSHVPFT

SEQ ID NO: 851 - DNA, 48 bp, synthetic construct; identical to SEQ ID NO: 743
  misc_feature 1..48: note = Description of Artificial Sequence: Synthetic oligonucleotide
  source 1..48: mol_type = other DNA

SEQ ID NO: 852 - protein, 16 aa, synthetic construct
  REGION 1..16: note = Description of Artificial Sequence: Synthetic peptide
RSSQSILHSNGNTYLE

SEQ ID NO: 853 - DNA, 21 bp, synthetic construct
  misc_feature 1..21: note = Description of Artificial Sequence: Synthetic oligonucleotide
  source 1..21: mol_type = other DNA
aaggtgtccaaccggttctcc

SEQ ID NO: 854 - protein, 7 aa, synthetic construct
  REGION 1..7: note = Description of Artificial Sequence: Synthetic peptide
KVSNRFS

SEQ ID NO: 855 - DNA, 27 bp, synthetic construct
  misc_feature 1..27: note = Description of Artificial Sequence: Synthetic oligonucleotide
  source 1..27: mol_type = other DNA
tttcaaggctcccacgtgcccttcacc

SEQ ID NO: 856 - protein, 9 aa, synthetic construct
  REGION 1..9: note = Description of Artificial Sequence: Synthetic peptide
FQGSHVPFT

SEQ ID NO: 857 - DNA, 48 bp, synthetic construct; identical to SEQ ID NO: 743
  misc_feature 1..48: note = Description of Artificial Sequence: Synthetic oligonucleotide
  source 1..48: mol_type = other DNA

SEQ ID NO: 858 - protein, 16 aa, synthetic construct
  REGION 1..16: note = Description of Artificial Sequence: Synthetic peptide
RSSQSILHSNGNTYLE

SEQ ID NO: 859 - DNA, 21 bp, synthetic construct
  misc_feature 1..21: note = Description of Artificial Sequence: Synthetic oligonucleotide
  source 1..21: mol_type = other DNA
aaggtgtccaaccggttctct

SEQ ID NO: 860 - protein, 7 aa, synthetic construct
  REGION 1..7: note = Description of Artificial Sequence: Synthetic peptide
KVSNRFS

SEQ ID NO: 861 - DNA, 27 bp, synthetic construct
  misc_feature 1..27: note = Description of Artificial Sequence: Synthetic oligonucleotide
  source 1..27: mol_type = other DNA
tttcaaggctcccacgtgcccttcacc

SEQ ID NO: 862 - protein, 9 aa, synthetic construct
  REGION 1..9: note = Description of Artificial Sequence: Synthetic peptide
FQGSHVPFT

SEQ ID NO: 863 - DNA, 24 bp, synthetic construct
  misc_feature 1..24: note = Description of Artificial Sequence: Synthetic oligonucleotide
  source 1..24: mol_type = other DNA
ggctacaccttcaccacctactgg

SEQ ID NO: 864 - protein, 8 aa, synthetic construct
  REGION 1..8: note = Description of Artificial Sequence: Synthetic peptide
GYTFTTYW

SEQ ID NO: 865 - DNA, 24 bp, synthetic construct
  misc_feature 1..24: note = Description of Artificial Sequence: Synthetic oligonucleotide
  source 1..24: mol_type = other DNA
atttatcctggtagtagtatttgt

SEQ ID NO: 866 - protein, 8 aa, synthetic construct
  REGION 1..8: note = Description of Artificial Sequence: Synthetic peptide
IYPGSSIC

SEQ ID NO: 867 - DNA, 36 bp, synthetic construct
  misc_feature 1..36: note = Description of Artificial Sequence: Synthetic oligonucleotide
  source 1..36: mol_type = other DNA
gcaagggaggatggttacgacgcctggtttgcttac

SEQ ID NO: 868 - protein, 12 aa, synthetic construct
  REGION 1..12: note = Description of Artificial Sequence: Synthetic peptide
AREDGYDAWFAY

SEQ ID NO: 869 - DNA, 24 bp, synthetic construct
  misc_feature 1..24: note = Description of Artificial Sequence: Synthetic oligonucleotide
  source 1..24: mol_type = other DNA
ggctacacctttaccacctactgg

SEQ ID NO: 870 - protein, 8 aa, synthetic construct
  REGION 1..8: note = Description of Artificial Sequence: Synthetic peptide
GYTFTTYW

SEQ ID NO: 871 - DNA, 24 bp, synthetic construct
  misc_feature 1..24: note = Description of Artificial Sequence: Synthetic oligonucleotide
  source 1..24: mol_type = other DNA
atctaccccggctcctccatctgc

SEQ ID NO: 872 - protein, 8 aa, synthetic construct
  REGION 1..8: note = Description of Artificial Sequence: Synthetic peptide
IYPGSSIC

SEQ ID NO: 873 - DNA, 36 bp, synthetic construct
  misc_feature 1..36: note = Description of Artificial Sequence: Synthetic oligonucleotide
  source 1..36: mol_type = other DNA
gctagagaggacggctacgacgcttggtttgcctac

SEQ ID NO: 874 - protein, 12 aa, synthetic construct
  REGION 1..12: note = Description of Artificial Sequence: Synthetic peptide
AREDGYDAWFAY

SEQ ID NO: 875 - DNA, 24 bp, synthetic construct
  misc_feature 1..24: note = Description of Artificial Sequence: Synthetic oligonucleotide
  source 1..24: mol_type = other DNA
ggctacacctttaccacctactgg

SEQ ID NO: 876 - protein, 8 aa, synthetic construct
  REGION 1..8: note = Description of Artificial Sequence: Synthetic peptide
GYTFTTYW

SEQ ID NO: 877 - DNA, 24 bp, synthetic construct
  misc_feature 1..24: note = Description of Artificial Sequence: Synthetic oligonucleotide
  source 1..24: mol_type = other DNA
atctaccccggctcctccatctgc

SEQ ID NO: 878 - protein, 8 aa, synthetic construct
  REGION 1..8: note = Description of Artificial Sequence: Synthetic peptide
IYPGSSIC

SEQ ID NO: 879 - DNA, 36 bp, synthetic construct; identical to SEQ ID NO: 873
  misc_feature 1..36: note = Description of Artificial Sequence: Synthetic oligonucleotide
  source 1..36: mol_type = other DNA

SEQ ID NO: 880 - protein, 12 aa, synthetic construct
  REGION 1..12: note = Description of Artificial Sequence: Synthetic peptide
AREDGYDAWFAY

SEQ ID NO: 881 - DNA, 24 bp, synthetic construct
  misc_feature 1..24: note = Description of Artificial Sequence: Synthetic oligonucleotide
  source 1..24: mol_type = other DNA
ggctacacctttaccacctactgg

SEQ ID NO: 882 - protein, 8 aa, synthetic construct
  REGION 1..8: note = Description of Artificial Sequence: Synthetic peptide
GYTFTTYW

SEQ ID NO: 883 - DNA, 24 bp, synthetic construct
  misc_feature 1..24: note = Description of Artificial Sequence: Synthetic oligonucleotide
  source 1..24: mol_type = other DNA
atctaccccggctcctccatctgc

SEQ ID NO: 884 - protein, 8 aa, synthetic construct
  REGION 1..8: note = Description of Artificial Sequence: Synthetic peptide
IYPGSSIC

SEQ ID NO: 885 - DNA, 36 bp, synthetic construct; identical to SEQ ID NO: 873
  misc_feature 1..36: note = Description of Artificial Sequence: Synthetic oligonucleotide
  source 1..36: mol_type = other DNA

SEQ ID NO: 886 - protein, 12 aa, synthetic construct
  REGION 1..12: note = Description of Artificial Sequence: Synthetic peptide
AREDGYDAWFAY

SEQ ID NO: 887 - DNA, 24 bp, synthetic construct
  misc_feature 1..24: note = Description of Artificial Sequence: Synthetic oligonucleotide
  source 1..24: mol_type = other DNA
ggctacacctttaccacctactgg

SEQ ID NO: 888 - protein, 8 aa, synthetic construct
  REGION 1..8: note = Description of Artificial Sequence: Synthetic peptide
GYTFTTYW

SEQ ID NO: 889 - DNA, 24 bp, synthetic construct
  misc_feature 1..24: note = Description of Artificial Sequence: Synthetic oligonucleotide
  source 1..24: mol_type = other DNA
atctaccccggctcctccatctgc

SEQ ID NO: 890 - protein, 8 aa, synthetic construct
  REGION 1..8: note = Description of Artificial Sequence: Synthetic peptide
IYPGSSIC

SEQ ID NO: 891 - DNA, 36 bp, synthetic construct; identical to SEQ ID NO: 873
  misc_feature 1..36: note = Description of Artificial Sequence: Synthetic oligonucleotide
  source 1..36: mol_type = other DNA

SEQ ID NO: 892 - protein, 12 aa, synthetic construct
  REGION 1..12: note = Description of Artificial Sequence: Synthetic peptide
AREDGYDAWFAY

SEQ ID NO: 893 - DNA, 24 bp, synthetic construct
  misc_feature 1..24: note = Description of Artificial Sequence: Synthetic oligonucleotide
  source 1..24: mol_type = other DNA
ggctacacctttaccacctactgg

SEQ ID NO: 894 - protein, 8 aa, synthetic construct
  REGION 1..8: note = Description of Artificial Sequence: Synthetic peptide
GYTFTTYW

SEQ ID NO: 895 - DNA, 24 bp, synthetic construct
  misc_feature 1..24: note = Description of Artificial Sequence: Synthetic oligonucleotide
  source 1..24: mol_type = other DNA
atctaccccggctcctccatctcc

SEQ ID NO: 896 - protein, 8 aa, synthetic construct
  REGION 1..8: note = Description of Artificial Sequence: Synthetic peptide
IYPGSSIS

SEQ ID NO: 897 - DNA, 36 bp, synthetic construct; identical to SEQ ID NO: 873
  misc_feature 1..36: note = Description of Artificial Sequence: Synthetic oligonucleotide
  source 1..36: mol_type = other DNA

SEQ ID NO: 898 - protein, 12 aa, synthetic construct
  REGION 1..12: note = Description of Artificial Sequence: Synthetic peptide
AREDGYDAWFAY

SEQ ID NO: 899 - DNA, 24 bp, synthetic construct
  misc_feature 1..24: note = Description of Artificial Sequence: Synthetic oligonucleotide
  source 1..24: mol_type = other DNA
ggctacacctttaccacctactgg

SEQ ID NO: 900 - protein, 8 aa, synthetic construct
  REGION 1..8: note = Description of Artificial Sequence: Synthetic peptide
GYTFTTYW

SEQ ID NO: 901 - DNA, 24 bp, synthetic construct
  misc_feature 1..24: note = Description of Artificial Sequence: Synthetic oligonucleotide
  source 1..24: mol_type = other DNA
atctaccccggctcctccatctcc

SEQ ID NO: 902 - protein, 8 aa, synthetic construct
  REGION 1..8: note = Description of Artificial Sequence: Synthetic peptide
IYPGSSIS

SEQ ID NO: 903 - DNA, 36 bp, synthetic construct; identical to SEQ ID NO: 873
  misc_feature 1..36: note = Description of Artificial Sequence: Synthetic oligonucleotide
  source 1..36: mol_type = other DNA

SEQ ID NO: 904 - protein, 12 aa, synthetic construct
  REGION 1..12: note = Description of Artificial Sequence: Synthetic peptide
AREDGYDAWFAY

SEQ ID NO: 905 - DNA, 24 bp, synthetic construct
  misc_feature 1..24: note = Description of Artificial Sequence: Synthetic oligonucleotide
  source 1..24: mol_type = other DNA
ggctacacctttaccacctactgg

SEQ ID NO: 906 - protein, 8 aa, synthetic construct
  REGION 1..8: note = Description of Artificial Sequence: Synthetic peptide
GYTFTTYW

SEQ ID NO: 907 - DNA, 24 bp, synthetic construct
  misc_feature 1..24: note = Description of Artificial Sequence: Synthetic oligonucleotide
  source 1..24: mol_type = other DNA
atctaccccggctcctccatctcc

SEQ ID NO: 908 - protein, 8 aa, synthetic construct
  REGION 1..8: note = Description of Artificial Sequence: Synthetic peptide
IYPGSSIS

SEQ ID NO: 909 - DNA, 36 bp, synthetic construct; identical to SEQ ID NO: 873
  misc_feature 1..36: note = Description of Artificial Sequence: Synthetic oligonucleotide
  source 1..36: mol_type = other DNA

SEQ ID NO: 910 - protein, 12 aa, synthetic construct
  REGION 1..12: note = Description of Artificial Sequence: Synthetic peptide
AREDGYDAWFAY

SEQ ID NO: 911 - DNA, 24 bp, synthetic construct
  misc_feature 1..24: note = Description of Artificial Sequence: Synthetic oligonucleotide
  source 1..24: mol_type = other DNA
ggctacacctttaccacctactgg

SEQ ID NO: 912 - protein, 8 aa, synthetic construct
  REGION 1..8: note = Description of Artificial Sequence: Synthetic peptide
GYTFTTYW

SEQ ID NO: 913 - DNA, 24 bp, synthetic construct
  misc_feature 1..24: note = Description of Artificial Sequence: Synthetic oligonucleotide
  source 1..24: mol_type = other DNA
atctaccccggctcctccatctcc

SEQ ID NO: 914 - protein, 8 aa, synthetic construct
  REGION 1..8: note = Description of Artificial Sequence: Synthetic peptide
IYPGSSIS

SEQ ID NO: 915 - DNA, 36 bp, synthetic construct; identical to SEQ ID NO: 873
  misc_feature 1..36: note = Description of Artificial Sequence: Synthetic oligonucleotide
  source 1..36: mol_type = other DNA

SEQ ID NO: 916 - protein, 12 aa, synthetic construct
  REGION 1..12: note = Description of Artificial Sequence: Synthetic peptide
AREDGYDAWFAY

SEQ ID NO: 917 - DNA, 24 bp, synthetic construct
  misc_feature 1..24: note = Description of Artificial Sequence: Synthetic oligonucleotide
  source 1..24: mol_type = other DNA
ggctacacctttaccacctactgg

SEQ ID NO: 918 - protein, 8 aa, synthetic construct
  REGION 1..8: note = Description of Artificial Sequence: Synthetic peptide
GYTFTTYW

SEQ ID NO: 919 - DNA, 24 bp, synthetic construct
  misc_feature 1..24: note = Description of Artificial Sequence: Synthetic oligonucleotide
  source 1..24: mol_type = other DNA
atctaccccggctcctccatctgc

SEQ ID NO: 920 - protein, 8 aa, synthetic construct
  REGION 1..8: note = Description of Artificial Sequence: Synthetic peptide
IYPGSSIC

SEQ ID NO: 921 - DNA, 36 bp, synthetic construct; identical to SEQ ID NO: 873
  misc_feature 1..36: note = Description of Artificial Sequence: Synthetic oligonucleotide
  source 1..36: mol_type = other DNA

SEQ ID NO: 922 - protein, 12 aa, synthetic construct
  REGION 1..12: note = Description of Artificial Sequence: Synthetic peptide
AREDGYDAWFAY

SEQ ID NO: 923 - DNA, 24 bp, synthetic construct
  misc_feature 1..24: note = Description of Artificial Sequence: Synthetic oligonucleotide
  source 1..24: mol_type = other DNA
ggctacacctttaccacctactgg

SEQ ID NO: 924 - protein, 8 aa, synthetic construct
  REGION 1..8: note = Description of Artificial Sequence: Synthetic peptide
GYTFTTYW

SEQ ID NO: 925 - DNA, 24 bp, synthetic construct
  misc_feature 1..24: note = Description of Artificial Sequence: Synthetic oligonucleotide
  source 1..24: mol_type = other DNA
atctaccccggctcctccatctgc

SEQ ID NO: 926 - protein, 8 aa, synthetic construct
  REGION 1..8: note = Description of Artificial Sequence: Synthetic peptide
IYPGSSIC

SEQ ID NO: 927 - DNA, 36 bp, synthetic construct; identical to SEQ ID NO: 873
  misc_feature 1..36: note = Description of Artificial Sequence: Synthetic oligonucleotide
  source 1..36: mol_type = other DNA

SEQ ID NO: 928 - protein, 12 aa, synthetic construct
  REGION 1..12: note = Description of Artificial Sequence: Synthetic peptide
AREDGYDAWFAY

SEQ ID NO: 929 - DNA, 24 bp, synthetic construct
  misc_feature 1..24: note = Description of Artificial Sequence: Synthetic oligonucleotide
  source 1..24: mol_type = other DNA
ggctacaccttcaccacctactgg

SEQ ID NO: 930 - protein, 8 aa, synthetic construct
  REGION 1..8: note = Description of Artificial Sequence: Synthetic peptide
GYTFTTYW

SEQ ID NO: 931 - DNA, 24 bp, synthetic construct
  misc_feature 1..24: note = Description of Artificial Sequence: Synthetic oligonucleotide
  source 1..24: mol_type = other DNA
atctaccccggctcctccatctgc

SEQ ID NO: 932 - protein, 8 aa, synthetic construct
  REGION 1..8: note = Description of Artificial Sequence: Synthetic peptide
IYPGSSIC

SEQ ID NO: 933 - DNA, 36 bp, synthetic construct
  misc_feature 1..36: note = Description of Artificial Sequence: Synthetic oligonucleotide
  source 1..36: mol_type = other DNA
gccaaagaggacggctacgacgcttggtttgcctac

SEQ ID NO: 934 - protein, 12 aa, synthetic construct
  REGION 1..12: note = Description of Artificial Sequence: Synthetic peptide
AKEDGYDAWFAY

SEQ ID NO: 935 - DNA, 24 bp, synthetic construct
  misc_feature 1..24: note = Description of Artificial Sequence: Synthetic oligonucleotide
  source 1..24: mol_type = other DNA
ggctacaccttcaccacctactgg

SEQ ID NO: 936 - protein, 8 aa, synthetic construct
  REGION 1..8: note = Description of Artificial Sequence: Synthetic peptide
GYTFTTYW

SEQ ID NO: 937 - DNA, 24 bp, synthetic construct
  misc_feature 1..24: note = Description of Artificial Sequence: Synthetic oligonucleotide
  source 1..24: mol_type = other DNA
atctaccccggctcctccatctgc

SEQ ID NO: 938 - protein, 8 aa, synthetic construct
  REGION 1..8: note = Description of Artificial Sequence: Synthetic peptide
IYPGSSIC

SEQ ID NO: 939 - DNA, 36 bp, synthetic construct
  misc_feature 1..36: note = Description of Artificial Sequence: Synthetic oligonucleotide
  source 1..36: mol_type = other DNA
gccagagaggacggctacgacgcttggtttgcttac

SEQ ID NO: 940 - protein, 12 aa, synthetic construct
  REGION 1..12: note = Description of Artificial Sequence: Synthetic peptide
AREDGYDAWFAY

SEQ ID NO: 941 - DNA, 24 bp, synthetic construct
  misc_feature 1..24: note = Description of Artificial Sequence: Synthetic oligonucleotide
  source 1..24: mol_type = other DNA
ggctacaccttcaccacctactgg

SEQ ID NO: 942 - protein, 8 aa, synthetic construct
  REGION 1..8: note = Description of Artificial Sequence: Synthetic peptide
GYTFTTYW

SEQ ID NO: 943 - DNA, 24 bp, synthetic construct
  misc_feature 1..24: note = Description of Artificial Sequence: Synthetic oligonucleotide
  source 1..24: mol_type = other DNA
atctaccccggctcctccatctgc

SEQ ID NO: 944 - protein, 8 aa, synthetic construct
  REGION 1..8: note = Description of Artificial Sequence: Synthetic peptide
IYPGSSIC

SEQ ID NO: 945 - DNA, 36 bp, synthetic construct; identical to SEQ ID NO: 939
  misc_feature 1..36: note = Description of Artificial Sequence: Synthetic oligonucleotide
  source 1..36: mol_type = other DNA

SEQ ID NO: 946 - protein, 12 aa, synthetic construct
  REGION 1..12: note = Description of Artificial Sequence: Synthetic peptide
AREDGYDAWFAY

SEQ ID NO: 947 - DNA, 24 bp, synthetic construct
  misc_feature 1..24: note = Description of Artificial Sequence: Synthetic oligonucleotide
  source 1..24: mol_type = other DNA
ggctacaccttcaccacctactgg

SEQ ID NO: 948 - protein, 8 aa, synthetic construct
  REGION 1..8: note = Description of Artificial Sequence: Synthetic peptide
GYTFTTYW

SEQ ID NO: 949 - DNA, 24 bp, synthetic construct
  misc_feature 1..24: note = Description of Artificial Sequence: Synthetic oligonucleotide
  source 1..24: mol_type = other DNA
atctaccccggctcctccatctgc

SEQ ID NO: 950 - protein, 8 aa, synthetic construct
  REGION 1..8: note = Description of Artificial Sequence: Synthetic peptide
IYPGSSIC

SEQ ID NO: 951 - DNA, 36 bp, synthetic construct; identical to SEQ ID NO: 939
  misc_feature 1..36: note = Description of Artificial Sequence: Synthetic oligonucleotide
  source 1..36: mol_type = other DNA

SEQ ID NO: 952 - protein, 12 aa, synthetic construct
  REGION 1..12: note = Description of Artificial Sequence: Synthetic peptide
AREDGYDAWFAY

SEQ ID NO: 953 - DNA, 24 bp, synthetic construct
  misc_feature 1..24: note = Description of Artificial Sequence: Synthetic oligonucleotide
  source 1..24: mol_type = other DNA
ggctacaccttcaccacctactgg

SEQ ID NO: 954 - protein, 8 aa, synthetic construct
  REGION 1..8: note = Description of Artificial Sequence: Synthetic peptide
GYTFTTYW

SEQ ID NO: 955 - DNA, 24 bp, synthetic construct
  misc_feature 1..24: note = Description of Artificial Sequence: Synthetic oligonucleotide
  source 1..24: mol_type = other DNA
atctaccccggctcctccatctgc

SEQ ID NO: 956 - protein, 8 aa, synthetic construct
  REGION 1..8: note = Description of Artificial Sequence: Synthetic peptide
IYPGSSIC

SEQ ID NO: 957 - DNA, 36 bp, synthetic construct; identical to SEQ ID NO: 939
  misc_feature 1..36: note = Description of Artificial Sequence: Synthetic oligonucleotide
  source 1..36: mol_type = other DNA

SEQ ID NO: 958 - protein, 12 aa, synthetic construct
  REGION 1..12: note = Description of Artificial Sequence: Synthetic peptide
AREDGYDAWFAY

SEQ ID NO: 959 - DNA, 24 bp, synthetic construct
  misc_feature 1..24: note = Description of Artificial Sequence: Synthetic oligonucleotide
  source 1..24: mol_type = other DNA
ggctacaccttcaccacctactgg

SEQ ID NO: 960 - protein, 8 aa, synthetic construct
  REGION 1..8: note = Description of Artificial Sequence: Synthetic peptide
GYTFTTYW

SEQ ID NO: 961 - DNA, 24 bp, synthetic construct
  misc_feature 1..24: note = Description of Artificial Sequence: Synthetic oligonucleotide
  source 1..24: mol_type = other DNA
atctaccccggctcctccatctgc

SEQ ID NO: 962 - protein, 8 aa, synthetic construct
  REGION 1..8: note = Description of Artificial Sequence: Synthetic peptide
IYPGSSIC

SEQ ID NO: 963 - DNA, 36 bp, synthetic construct; identical to SEQ ID NO: 939
  misc_feature 1..36: note = Description of Artificial Sequence: Synthetic oligonucleotide
  source 1..36: mol_type = other DNA

SEQ ID NO: 964 - protein, 12 aa, synthetic construct
  REGION 1..12: note = Description of Artificial Sequence: Synthetic peptide
AREDGYDAWFAY

SEQ ID NO: 965 - DNA, 24 bp, synthetic construct
  misc_feature 1..24: note = Description of Artificial Sequence: Synthetic oligonucleotide
  source 1..24: mol_type = other DNA
ggctacaccttcaccacctactgg

SEQ ID NO: 966 - protein, 8 aa, synthetic construct
  REGION 1..8: note = Description of Artificial Sequence: Synthetic peptide
GYTFTTYW

SEQ ID NO: 967 - DNA, 24 bp, synthetic construct
  misc_feature 1..24: note = Description of Artificial Sequence: Synthetic oligonucleotide
  source 1..24: mol_type = other DNA
atctaccccggctcctccatctgc

SEQ ID NO: 968 - protein, 8 aa, synthetic construct
  REGION 1..8: note = Description of Artificial Sequence: Synthetic peptide
IYPGSSIC

SEQ ID NO: 969 - DNA, 36 bp, synthetic construct; identical to SEQ ID NO: 939
  misc_feature 1..36: note = Description of Artificial Sequence: Synthetic oligonucleotide
  source 1..36: mol_type = other DNA

SEQ ID NO: 970 - protein, 12 aa, synthetic construct
  REGION 1..12: note = Description of Artificial Sequence: Synthetic peptide
AREDGYDAWFAY

SEQ ID NO: 971 - DNA, 24 bp, synthetic construct
  misc_feature 1..24: note = Description of Artificial Sequence: Synthetic oligonucleotide
  source 1..24: mol_type = other DNA
ggctacaccttcaccacctactgg

SEQ ID NO: 972 - protein, 8 aa, synthetic construct
  REGION 1..8: note = Description of Artificial Sequence: Synthetic peptide
GYTFTTYW

SEQ ID NO: 973 - DNA, 24 bp, synthetic construct
  misc_feature 1..24: note = Description of Artificial Sequence: Synthetic oligonucleotide
  source 1..24: mol_type = other DNA
atctaccccggctcctccatctgc

SEQ ID NO: 974 - protein, 8 aa, synthetic construct
  REGION 1..8: note = Description of Artificial Sequence: Synthetic peptide
IYPGSSIC

SEQ ID NO: 975 - DNA, 36 bp, synthetic construct; identical to SEQ ID NO: 939
  misc_feature 1..36: note = Description of Artificial Sequence: Synthetic oligonucleotide
  source 1..36: mol_type = other DNA

SEQ ID NO: 976 - protein, 12 aa, synthetic construct
  REGION 1..12: note = Description of Artificial Sequence: Synthetic peptide
AREDGYDAWFAY

SEQ ID NO: 977 - DNA, 24 bp, synthetic construct
  misc_feature 1..24: note = Description of Artificial Sequence: Synthetic oligonucleotide
  source 1..24: mol_type = other DNA
ggctacaccttcaccacctactgg

SEQ ID NO: 978 - protein, 8 aa, synthetic construct
  REGION 1..8: note = Description of Artificial Sequence: Synthetic peptide
GYTFTTYW

SEQ ID NO: 979 - DNA, 24 bp, synthetic construct
  misc_feature 1..24: note = Description of Artificial Sequence: Synthetic oligonucleotide
  source 1..24: mol_type = other DNA
atctaccccggctcctccatctgc

SEQ ID NO: 980 - protein, 8 aa, synthetic construct
  REGION 1..8: note = Description of Artificial Sequence: Synthetic peptide
IYPGSSIC

SEQ ID NO: 981 - DNA, 36 bp, synthetic construct; identical to SEQ ID NO: 939
  misc_feature 1..36: note = Description of Artificial Sequence: Synthetic oligonucleotide
  source 1..36: mol_type = other DNA

SEQ ID NO: 982 - protein, 12 aa, synthetic construct
  REGION 1..12: note = Description of Artificial Sequence: Synthetic peptide
AREDGYDAWFAY

SEQ ID NO: 983 - DNA, 24 bp, synthetic construct
  misc_feature 1..24: note = Description of Artificial Sequence: Synthetic oligonucleotide
  source 1..24: mol_type = other DNA
ggctacaccttcaccacctactgg

SEQ ID NO: 984 - protein, 8 aa, synthetic construct
  REGION 1..8: note = Description of Artificial Sequence: Synthetic peptide
GYTFTTYW

SEQ ID NO: 985 - DNA, 24 bp, synthetic construct
  misc_feature 1..24: note = Description of Artificial Sequence: Synthetic oligonucleotide
  source 1..24: mol_type = other DNA
atctaccccggctcctccatctgc

SEQ ID NO: 986 - protein, 8 aa, synthetic construct
  REGION 1..8: note = Description of Artificial Sequence: Synthetic peptide
IYPGSSIC

SEQ ID NO: 987 - DNA, 36 bp, synthetic construct
  misc_feature 1..36: note = Description of Artificial Sequence: Synthetic oligonucleotide
  source 1..36: mol_type = other DNA
gccaaagaggacggctacgacgcttggtttgcttac

SEQ ID NO: 988 - protein, 12 aa, synthetic construct
  REGION 1..12: note = Description of Artificial Sequence: Synthetic peptide
AKEDGYDAWFAY

SEQ ID NO: 989 - DNA, 24 bp, synthetic construct
  misc_feature 1..24: note = Description of Artificial Sequence: Synthetic oligonucleotide
  source 1..24: mol_type = other DNA
ggctacaccttcaccacctactgg

SEQ ID NO: 990 - protein, 8 aa, synthetic construct
  REGION 1..8: note = Description of Artificial Sequence: Synthetic peptide
GYTFTTYW

SEQ ID NO: 991 - DNA, 24 bp, synthetic construct
  misc_feature 1..24: note = Description of Artificial Sequence: Synthetic oligonucleotide
  source 1..24: mol_type = other DNA
atctaccccggctcctccatctcc

SEQ ID NO: 992 - protein, 8 aa, synthetic construct
  REGION 1..8: note = Description of Artificial Sequence: Synthetic peptide
IYPGSSIS

SEQ ID NO: 993 - DNA, 36 bp, synthetic construct; identical to SEQ ID NO: 873
  misc_feature 1..36: note = Description of Artificial Sequence: Synthetic oligonucleotide
  source 1..36: mol_type = other DNA

SEQ ID NO: 994 - protein, 12 aa, synthetic construct
  REGION 1..12: note = Description of Artificial Sequence: Synthetic peptide
AREDGYDAWFAY

SEQ ID NO: 995 - DNA, 24 bp, synthetic construct
  misc_feature 1..24: note = Description of Artificial Sequence: Synthetic oligonucleotide
  source 1..24: mol_type = other DNA
ggctacaccttcaccacctactgg

SEQ ID NO: 996 - protein, 8 aa, synthetic construct
  REGION 1..8: note = Description of Artificial Sequence: Synthetic peptide
GYTFTTYW

SEQ ID NO: 997 - DNA, 24 bp, synthetic construct
  misc_feature 1..24: note = Description of Artificial Sequence: Synthetic oligonucleotide
  source 1..24: mol_type = other DNA
atctaccccggctcctccatctcc

SEQ ID NO: 998 - protein, 8 aa, synthetic construct
  REGION 1..8: note = Description of Artificial Sequence: Synthetic peptide
IYPGSSIS

SEQ ID NO: 999 - DNA, 36 bp, synthetic construct
  misc_feature 1..36: note = Description of Artificial Sequence: Synthetic oligonucleotide
  source 1..36: mol_type = other DNA
gccagagaggacggctacgacgcttggtttgcctac

SEQ ID NO: 1000 - protein, 12 aa, synthetic construct
  REGION 1..12: note = Description of Artificial Sequence: Synthetic peptide
AREDGYDAWFAY

SEQ ID NO: 1001 - DNA, 24 bp, synthetic construct
  misc_feature 1..24: note = Description of Artificial Sequence: Synthetic oligonucleotide
  source 1..24: mol_type = other DNA
ggctacaccttcaccacctactgg

SEQ ID NO: 1002 - protein, 8 aa, synthetic construct
  REGION 1..8: note = Description of Artificial Sequence: Synthetic peptide
GYTFTTYW

SEQ ID NO: 1003 - DNA, 24 bp, synthetic construct
  misc_feature 1..24: note = Description of Artificial Sequence: Synthetic oligonucleotide
  source 1..24: mol_type = other DNA
atctaccccggctcctccatctcc

SEQ ID NO: 1004 - protein, 8 aa, synthetic construct
  REGION 1..8: note = Description of Artificial Sequence: Synthetic peptide
IYPGSSIS

SEQ ID NO: 1005 - DNA, 36 bp, synthetic construct; identical to SEQ ID NO: 939
  misc_feature 1..36: note = Description of Artificial Sequence: Synthetic oligonucleotide
  source 1..36: mol_type = other DNA

SEQ ID NO: 1006 - protein, 12 aa, synthetic construct
  REGION 1..12: note = Description of Artificial Sequence: Synthetic peptide
AREDGYDAWFAY

SEQ ID NO: 1007 - DNA, 33 bp, synthetic construct
  misc_feature 1..33: note = Description of Artificial Sequence: Synthetic oligonucleotide
  source 1..33: mol_type = other DNA
cagagcattttacatagtaatggaaacacctat

SEQ ID NO: 1008 - protein, 11 aa, synthetic construct
  REGION 1..11: note = Description of Artificial Sequence: Synthetic peptide
QSILHSNGNTY

SEQ ID NO: 1009-1010 - skipped (2 entries)

SEQ ID NO: 1011 - DNA, 27 bp, synthetic construct
  misc_feature 1..27: note = Description of Artificial Sequence: Synthetic oligonucleotide
  source 1..27: mol_type = other DNA
tttcaaggttcacatgttccattcacg

SEQ ID NO: 1012 - protein, 9 aa, synthetic construct
  REGION 1..9: note = Description of Artificial Sequence: Synthetic peptide
FQGSHVPFT

SEQ ID NO: 1013 - DNA, 33 bp, synthetic construct
  misc_feature 1..33: note = Description of Artificial Sequence: Synthetic oligonucleotide
  source 1..33: mol_type = other DNA
cagtccatcctgcactccaacggcaacacctac

SEQ ID NO: 1014 - protein, 11 aa, synthetic construct
  REGION 1..11: note = Description of Artificial Sequence: Synthetic peptide
QSILHSNGNTY

SEQ ID NO: 1015-1016 - skipped (2 entries)

SEQ ID NO: 1017 - DNA, 27 bp, synthetic construct
  misc_feature 1..27: note = Description of Artificial Sequence: Synthetic oligonucleotide
  source 1..27: mol_type = other DNA
tttcaaggctcccacgtgcccttcacc

SEQ ID NO: 1018 - protein, 9 aa, synthetic construct
  REGION 1..9: note = Description of Artificial Sequence: Synthetic peptide
FQGSHVPFT

SEQ ID NO: 1019 - DNA, 33 bp, synthetic construct; identical to SEQ ID NO: 1013
  misc_feature 1..33: note = Description of Artificial Sequence: Synthetic oligonucleotide
  source 1..33: mol_type = other DNA

SEQ ID NO: 1020 - protein, 11 aa, synthetic construct
  REGION 1..11: note = Description of Artificial Sequence: Synthetic peptide
QSILHSNGNTY

SEQ ID NO: 1021-1022 - skipped (2 entries)

SEQ ID NO: 1023 - DNA, 27 bp, synthetic construct
  misc_feature 1..27: note = Description of Artificial Sequence: Synthetic oligonucleotide
  source 1..27: mol_type = other DNA
tttcaaggctcccacgtgcccttcacc

SEQ ID NO: 1024 - protein, 9 aa, synthetic construct
  REGION 1..9: note = Description of Artificial Sequence: Synthetic peptide
FQGSHVPFT

SEQ ID NO: 1025 - DNA, 33 bp, synthetic construct; identical to SEQ ID NO: 1013
  misc_feature 1..33: note = Description of Artificial Sequence: Synthetic oligonucleotide
  source 1..33: mol_type = other DNA

SEQ ID NO: 1026 - protein, 11 aa, synthetic construct
  REGION 1..11: note = Description of Artificial Sequence: Synthetic peptide
QSILHSNGNTY

SEQ ID NO: 1027-1028 - skipped (2 entries)

SEQ ID NO: 1029 - DNA, 27 bp, synthetic construct
  misc_feature 1..27: note = Description of Artificial Sequence: Synthetic oligonucleotide
  source 1..27: mol_type = other DNA
tttcaaggctcccacgtgcccttcacc

SEQ ID NO: 1030 - protein, 9 aa, synthetic construct
  REGION 1..9: note = Description of Artificial Sequence: Synthetic peptide
FQGSHVPFT

SEQ ID NO: 1031 - DNA, 33 bp, synthetic construct; identical to SEQ ID NO: 1013
  misc_feature 1..33: note = Description of Artificial Sequence: Synthetic oligonucleotide
  source 1..33: mol_type = other DNA

SEQ ID NO: 1032 - protein, 11 aa, synthetic construct
  REGION 1..11: note = Description of Artificial Sequence: Synthetic peptide
QSILHSNGNTY

SEQ ID NO: 1033-1034 - skipped (2 entries)

SEQ ID NO: 1035 - DNA, 27 bp, synthetic construct
  misc_feature 1..27: note = Description of Artificial Sequence: Synthetic oligonucleotide
  source 1..27: mol_type = other DNA
tttcaaggctcccacgtgcccttcacc

SEQ ID NO: 1036 - protein, 9 aa, synthetic construct
  REGION 1..9: note = Description of Artificial Sequence: Synthetic peptide
FQGSHVPFT

SEQ ID NO: 1037 - DNA, 33 bp, synthetic construct; identical to SEQ ID NO: 1013
  misc_feature 1..33: note = Description of Artificial Sequence: Synthetic oligonucleotide
  source 1..33: mol_type = other DNA

SEQ ID NO: 1038 - protein, 11 aa, synthetic construct
  REGION 1..11: note = Description of Artificial Sequence: Synthetic peptide
QSILHSNGNTY

SEQ ID NO: 1039-1040 - skipped (2 entries)

SEQ ID NO: 1041 - DNA, 27 bp, synthetic construct
  misc_feature 1..27: note = Description of Artificial Sequence: Synthetic oligonucleotide
  source 1..27: mol_type = other DNA
tttcaaggctcccacgtgcccttcacc

SEQ ID NO: 1042 - protein, 9 aa, synthetic construct
  REGION 1..9: note = Description of Artificial Sequence: Synthetic peptide
FQGSHVPFT

SEQ ID NO: 1043 - DNA, 33 bp, synthetic construct; identical to SEQ ID NO: 1013
  misc_feature 1..33: note = Description of Artificial Sequence: Synthetic oligonucleotide
  source 1..33: mol_type = other DNA

SEQ ID NO: 1044 - protein, 11 aa, synthetic construct
  REGION 1..11: note = Description of Artificial Sequence: Synthetic peptide
QSILHSNGNTY

SEQ ID NO: 1045-1046 - skipped (2 entries)

SEQ ID NO: 1047 - DNA, 27 bp, synthetic construct
  misc_feature 1..27: note = Description of Artificial Sequence: Synthetic oligonucleotide
  source 1..27: mol_type = other DNA
tttcaaggctcccacgtgcccttcacc

SEQ ID NO: 1048 - protein, 9 aa, synthetic construct
  REGION 1..9: note = Description of Artificial Sequence: Synthetic peptide
FQGSHVPFT

SEQ ID NO: 1049 - DNA, 33 bp, synthetic construct; identical to SEQ ID NO: 1013
  misc_feature 1..33: note = Description of Artificial Sequence: Synthetic oligonucleotide
  source 1..33: mol_type = other DNA

SEQ ID NO: 1050 - protein, 11 aa, synthetic construct
  REGION 1..11: note = Description of Artificial Sequence: Synthetic peptide
QSILHSNGNTY

SEQ ID NO: 1051-1052 - skipped (2 entries)

SEQ ID NO: 1053 - DNA, 27 bp, synthetic construct
  misc_feature 1..27: note = Description of Artificial Sequence: Synthetic oligonucleotide
  source 1..27: mol_type = other DNA
tttcaaggctcccacgtgcccttcacc

SEQ ID NO: 1054 - protein, 9 aa, synthetic construct
  REGION 1..9: note = Description of Artificial Sequence: Synthetic peptide
FQGSHVPFT

SEQ ID NO: 1055 - DNA, 33 bp, synthetic construct
  misc_feature 1..33: note = Description of Artificial Sequence: Synthetic oligonucleotide
  source 1..33: mol_type = other DNA
cagtccatcgtgcactccaacggcaacacctac

SEQ ID NO: 1056 - protein, 11 aa, synthetic construct
  REGION 1..11: note = Description of Artificial Sequence: Synthetic peptide
QSIVHSNGNTY

SEQ ID NO: 1057-1058 - skipped (2 entries)

SEQ ID NO: 1059 - DNA, 27 bp, synthetic construct
  misc_feature 1..27: note = Description of Artificial Sequence: Synthetic oligonucleotide
  source 1..27: mol_type = other DNA
tttcaaggctcccacgtgcccttcacc

SEQ ID NO: 1060 - protein, 9 aa, synthetic construct
  REGION 1..9: note = Description of Artificial Sequence: Synthetic peptide
FQGSHVPFT

SEQ ID NO: 1061 - DNA, 33 bp, synthetic construct; identical to SEQ ID NO: 1055
  misc_feature 1..33: note = Description of Artificial Sequence: Synthetic oligonucleotide
  source 1..33: mol_type = other DNA

SEQ ID NO: 1062 - protein, 11 aa, synthetic construct
  REGION 1..11: note = Description of Artificial Sequence: Synthetic peptide
QSIVHSNGNTY

SEQ ID NO: 1063-1064 - skipped (2 entries)

SEQ ID NO: 1065 - DNA, 27 bp, synthetic construct
  misc_feature 1..27: note = Description of Artificial Sequence: Synthetic oligonucleotide
  source 1..27: mol_type = other DNA
tttcaaggctcccacgtgcccttcacc

SEQ ID NO: 1066 - protein, 9 aa, synthetic construct
  REGION 1..9: note = Description of Artificial Sequence: Synthetic peptide
FQGSHVPFT

SEQ ID NO: 1067 - DNA, 33 bp, synthetic construct; identical to SEQ ID NO: 1055
  misc_feature 1..33: note = Description of Artificial Sequence: Synthetic oligonucleotide
  source 1..33: mol_type = other DNA

SEQ ID NO: 1068 - protein, 11 aa, synthetic construct
  REGION 1..11: note = Description of Artificial Sequence: Synthetic peptide
QSIVHSNGNTY

SEQ ID NO: 1069-1070 - skipped (2 entries)

SEQ ID NO: 1071 - DNA, 27 bp, synthetic construct
  misc_feature 1..27: note = Description of Artificial Sequence: Synthetic oligonucleotide
  source 1..27: mol_type = other DNA
tttcaaggctcccacgtgcccttcacc

SEQ ID NO: 1072 - protein, 9 aa, synthetic construct
  REGION 1..9: note = Description of Artificial Sequence: Synthetic peptide
FQGSHVPFT

SEQ ID NO: 1073 - DNA, 33 bp, synthetic construct; identical to SEQ ID NO: 1013
  misc_feature 1..33: note = Description of Artificial Sequence: Synthetic oligonucleotide
  source 1..33: mol_type = other DNA

SEQ ID NO: 1074 - protein, 11 aa, synthetic construct
  REGION 1..11: note = Description of Artificial Sequence: Synthetic peptide
QSILHSNGNTY

SEQ ID NO: 1075-1076 - skipped (2 entries)

SEQ ID NO: 1077 - DNA, 27 bp, synthetic construct
  misc_feature 1..27: note = Description of Artificial Sequence: Synthetic oligonucleotide
  source 1..27: mol_type = other DNA
tttcaaggctcccacgtgcccttcacc

SEQ ID NO: 1078 - protein, 9 aa, synthetic construct
  REGION 1..9: note = Description of Artificial Sequence: Synthetic peptide
FQGSHVPFT

SEQ ID NO: 1079 - DNA, 33 bp, synthetic construct; identical to SEQ ID NO: 1013
  misc_feature 1..33: note = Description of Artificial Sequence: Synthetic oligonucleotide
  source 1..33: mol_type = other DNA

SEQ ID NO: 1080 - protein, 11 aa, synthetic construct
  REGION 1..11: note = Description of Artificial Sequence: Synthetic peptide
QSILHSNGNTY

SEQ ID NO: 1081-1082 - skipped (2 entries)

SEQ ID NO: 1083 - DNA, 27 bp, synthetic construct
  misc_feature 1..27: note = Description of Artificial Sequence: Synthetic oligonucleotide
  source 1..27: mol_type = other DNA
tttcaaggctcccacgtgcccttcacc

SEQ ID NO: 1084 - protein, 9 aa, synthetic construct
  REGION 1..9: note = Description of Artificial Sequence: Synthetic peptide
FQGSHVPFT

SEQ ID NO: 1085 - DNA, 33 bp, synthetic construct; identical to SEQ ID NO: 1013
  misc_feature 1..33: note = Description of Artificial Sequence: Synthetic oligonucleotide
  source 1..33: mol_type = other DNA

SEQ ID NO: 1086 - protein, 11 aa, synthetic construct
  REGION 1..11: note = Description of Artificial Sequence: Synthetic peptide
QSILHSNGNTY

SEQ ID NO: 1087-1088 - skipped (2 entries)

SEQ ID NO: 1089 - DNA, 27 bp, synthetic construct
  misc_feature 1..27: note = Description of Artificial Sequence: Synthetic oligonucleotide
  source 1..27: mol_type = other DNA
tttcaaggctcccacgtgcccttcacc

SEQ ID NO: 1090 - protein, 9 aa, synthetic construct
  REGION 1..9: note = Description of Artificial Sequence: Synthetic peptide
FQGSHVPFT

SEQ ID NO: 1091 - DNA, 33 bp, synthetic construct; identical to SEQ ID NO: 1013
  misc_feature 1..33: note = Description of Artificial Sequence: Synthetic oligonucleotide
  source 1..33: mol_type = other DNA

SEQ ID NO: 1092 - protein, 11 aa, synthetic construct
  REGION 1..11: note = Description of Artificial Sequence: Synthetic peptide
QSILHSNGNTY

SEQ ID NO: 1093-1094 - skipped (2 entries)

SEQ ID NO: 1095 - DNA, 27 bp, synthetic construct
  misc_feature 1..27: note = Description of Artificial Sequence: Synthetic oligonucleotide
  source 1..27: mol_type = other DNA
tttcaaggctcccacgtgcccttcacc

SEQ ID NO: 1096 - protein, 9 aa, synthetic construct
  REGION 1..9: note = Description of Artificial Sequence: Synthetic peptide
FQGSHVPFT

SEQ ID NO: 1097 - DNA, 33 bp, synthetic construct; identical to SEQ ID NO: 1013
  misc_feature 1..33: note = Description of Artificial Sequence: Synthetic oligonucleotide
  source 1..33: mol_type = other DNA

SEQ ID NO: 1098 - protein, 11 aa, synthetic construct
  REGION 1..11: note = Description of Artificial Sequence: Synthetic peptide
QSILHSNGNTY

SEQ ID NO: 1099-1100 - skipped (2 entries)

SEQ ID NO: 1101 - DNA, 27 bp, synthetic construct
  misc_feature 1..27: note = Description of Artificial Sequence: Synthetic oligonucleotide
  source 1..27: mol_type = other DNA
tttcaaggctcccacgtgcccttcacc

SEQ ID NO: 1102 - protein, 9 aa, synthetic construct
  REGION 1..9: note = Description of Artificial Sequence: Synthetic peptide
FQGSHVPFT

SEQ ID NO: 1103 - DNA, 33 bp, synthetic construct; identical to SEQ ID NO: 1055
  misc_feature 1..33: note = Description of Artificial Sequence: Synthetic oligonucleotide
  source 1..33: mol_type = other DNA

SEQ ID NO: 1104 - protein, 11 aa, synthetic construct
  REGION 1..11: note = Description of Artificial Sequence: Synthetic peptide
QSIVHSNGNTY

SEQ ID NO: 1105-1106 - skipped (2 entries)

SEQ ID NO: 1107 - DNA, 27 bp, synthetic construct
  misc_feature 1..27: note = Description of Artificial Sequence: Synthetic oligonucleotide
  source 1..27: mol_type = other DNA
tttcaaggctcccacgtgcccttcacc

SEQ ID NO: 1108 - protein, 9 aa, synthetic construct
  REGION 1..9: note = Description of Artificial Sequence: Synthetic peptide
FQGSHVPFT

SEQ ID NO: 1109 - DNA, 33 bp, synthetic construct; identical to SEQ ID NO: 1055
  misc_feature 1..33: note = Description of Artificial Sequence: Synthetic oligonucleotide
  source 1..33: mol_type = other DNA

SEQ ID NO: 1110 - protein, 11 aa, synthetic construct
  REGION 1..11: note = Description of Artificial Sequence: Synthetic peptide
QSIVHSNGNTY

SEQ ID NO: 1111-1112 - skipped (2 entries)

SEQ ID NO: 1113 - DNA, 27 bp, synthetic construct
  misc_feature 1..27: note = Description of Artificial Sequence: Synthetic oligonucleotide
  source 1..27: mol_type = other DNA
tttcaaggctcccacgtgcccttcacc

SEQ ID NO: 1114 - protein, 9 aa, synthetic construct
  REGION 1..9: note = Description of Artificial Sequence: Synthetic peptide
FQGSHVPFT

SEQ ID NO: 1115 - DNA, 33 bp, synthetic construct; identical to SEQ ID NO: 1013
  misc_feature 1..33: note = Description of Artificial Sequence: Synthetic oligonucleotide
  source 1..33: mol_type = other DNA

SEQ ID NO: 1116 - protein, 11 aa, synthetic construct
  REGION 1..11: note = Description of Artificial Sequence: Synthetic peptide
QSILHSNGNTY

SEQ ID NO: 1117-1118 - skipped (2 entries)

SEQ ID NO: 1119 - DNA, 27 bp, synthetic construct
  misc_feature 1..27: note = Description of Artificial Sequence: Synthetic oligonucleotide
  source 1..27: mol_type = other DNA
tttcaaggctcccacgtgcccttcacc

SEQ ID NO: 1120 - protein, 9 aa, synthetic construct
  REGION 1..9: note = Description of Artificial Sequence: Synthetic peptide
FQGSHVPFT

SEQ ID NO: 1121 - DNA, 33 bp, synthetic construct; identical to SEQ ID NO: 1013
  misc_feature 1..33: note = Description of Artificial Sequence: Synthetic oligonucleotide
  source 1..33: mol_type = other DNA

SEQ ID NO: 1122 - protein, 11 aa, synthetic construct
  REGION 1..11: note = Description of Artificial Sequence: Synthetic peptide
QSILHSNGNTY

SEQ ID NO: 1123-1124 - skipped (2 entries)

SEQ ID NO: 1125 - DNA, 27 bp, synthetic construct
  misc_feature 1..27: note = Description of Artificial Sequence: Synthetic oligonucleotide
  source 1..27: mol_type = other DNA
tttcaaggctcccacgtgcccttcacc

SEQ ID NO: 1126 - protein, 9 aa, synthetic construct
  REGION 1..9: note = Description of Artificial Sequence: Synthetic peptide
FQGSHVPFT

SEQ ID NO: 1127 - DNA, 33 bp, synthetic construct; identical to SEQ ID NO: 1013
  misc_feature 1..33: note = Description of Artificial Sequence: Synthetic oligonucleotide
  source 1..33: mol_type = other DNA

SEQ ID NO: 1128 - protein, 11 aa, synthetic construct
  REGION 1..11: note = Description of Artificial Sequence: Synthetic peptide
QSILHSNGNTY

SEQ ID NO: 1129-1130 - skipped (2 entries)

SEQ ID NO: 1131 - DNA, 27 bp, synthetic construct
  misc_feature 1..27: note = Description of Artificial Sequence: Synthetic oligonucleotide
  source 1..27: mol_type = other DNA
tttcaaggctcccacgtgcccttcacc

SEQ ID NO: 1132 - protein, 9 aa, synthetic construct
  REGION 1..9: note = Description of Artificial Sequence: Synthetic peptide
FQGSHVPFT

SEQ ID NO: 1133 - protein, 4 aa, Homo sapiens
HVPG

SEQ ID NO: 1134 - DNA, 1350 bp, synthetic construct
  misc_feature 1..1350: note = Description of Artificial Sequence: Synthetic polynucleotide
  source 1..1350: mol_type = other DNA
gaagtgcagctgctggaatctggcggcggactggtgcagcctggcggctctctgagactgtcttgtgccgcctccggctacaccttcaccacctactggatcacctgggtccgacaggctcccggcaagggactggaatgggtcggagacatctaccccggctcctccatctgcaactacgccgacaagttcaagggccggttcaccatctccgtggacaactccaagtccaccgcctacctccagatgaactccctgagagccgaggacaccgccgtgtactactgcgccagagaggacggctacgacgcttggtttgcttactggggccagggcaccctggtcaccgtgtcatctgcatccaccaagggcccatcggtcttccccctggcaccctcctccaagagcacctctgggggcacagcggccctgggctgcctggtcaaggactacttccccgaaccggtgacggtgtcgtggaactcaggcgccctgaccagcggcgtgcacaccttcccggctgtcctacagtcctcaggactctactccctcagcagcgtggtgaccgtgccctccagcagcttgggcacccagacctacatctgcaacgtgaatcacaagcccagcaacaccaaggtggacaagaaagttgagcccaaatcttgtgacaaaactcacacatgcccaccgtgcccagcacctgaactcctggggggaccgtcagtcttcctcttccccccaaaacccaaggacaccctcatgatctcccggacccctgaggtcacatgcgtggtggtggacgtgagccacgaagaccctgaggtcaagttcaactggtacgtggacggcgtggaggtgcataatgccaagacaaagccgcgggaggagcagtacaacagcacgtaccgtgtggtcagcgtcctcaccgtcctgcaccaggactggctgaatggcaaggagtacaagtgcaaggtctccaacaaagccctcccagcccccatcgagaaaaccatctccaaagccaaagggcagccccgagaaccacaggtgtacaccctgcccccatcccgggatgagctgaccaagaaccaggtcagcctgacctgcctggtcaaaggcttctatcccagcgacatcgccgtggagtgggagagcaatgggcagccggagaacaactacaagaccacgcctcccgtgctggactccgacggctccttcttcttatattcaaagctcaccgtggacaagagcaggtggcagcaggggaacgtcttctcatgctccgtgatgcatgaggctctgcacaaccactacacgcagaagagcctctccctgtctcccgggaaatga

SEQ ID NO: 1135 - protein, 7 aa, synthetic construct
  REGION 1..7: note = Description of Artificial Sequence: Synthetic peptide
KHVPGGG

SEQ ID NO: 1136 - protein, 5 aa, synthetic construct
  REGION 1..5: note = Description of Artificial Sequence: Synthetic peptide
  MOD_RES 2: note = Any amino acid
HXPGG

SEQ ID NO: 1137 - protein, 6 aa, synthetic construct
  REGION 1..6: note = Description of Artificial Sequence: Synthetic peptide
VQIINK

SEQ ID NO: 1138 - protein, 6 aa, synthetic construct
  REGION 1..6: note = Description of Artificial Sequence: Synthetic peptide
VQIVYK

SEQ ID NO: 1139 - protein, 10 aa, Homo sapiens
HVPGGGSVQI

SEQ ID NO: 1140 - protein, 7 aa, Homo sapiens
HVPGGGN

SEQ ID NO: 1141 - protein, 119 aa, synthetic construct; identical to SEQ ID NO: 196
  REGION 1..119: note = Description of Artificial Sequence: Synthetic polypeptide

SEQ ID NO: 1142 - protein, 98 aa, Homo sapiens
QVQLVQSGAEVKKPGASVKVSCKASGYTFTSYYMHWVRQAPGQGLEWMGIINPSGGSTSYAQKFQGRVTMTRDTSTSTVYMELSSLRSEDTAVYYCAR

SEQ ID NO: 1143 - protein, 11 aa, Homo sapiens
WGQGTLVTVSS

SEQ ID NO: 1144 - protein, 98 aa, Homo sapiens; identical to SEQ ID NO: 1142

SEQ ID NO: 1145 - protein, 98 aa, Homo sapiens
QVQLVQSGAEVKKPGASVKVSCKASGYTFTGYYMHWVRQAPGQGLEWMGWINPNSGGTNYAQKFQGRVTMTRDTSISTAYMELSRLRSDDTAVYYCAR

SEQ ID NO: 1146 - protein, 112 aa, synthetic construct; identical to SEQ ID NO: 411
  REGION 1..112: note = Description of Artificial Sequence: Synthetic polypeptide

SEQ ID NO: 1147 - protein, 100 aa, Homo sapiens
DVVMTQSPLSLPVTLGQPASISCRSSQSLVHSDGNTYLNWFQQRPGQSPRRLIYKVSNRDSGVPDRFSGSGSGTDFTLKISRVEAEDVGVYYCMQGTHWP

SEQ ID NO: 1148 - protein, 10 aa, Homo sapiens
FGQGTKLEIK

SEQ ID NO: 1149 - protein, 100 aa, Homo sapiens
DIVMTQTPLSLSVTPGQPASISCKSSQSLLHSDGKTYLYWYLQKPGQSPQLLIYEVSSRFSGVPDRFSGSGSGTDFTLKISRVEAEDVGVYYCMQGIHLP

SEQ ID NO: 1150 - protein, 100 aa, Homo sapiens; identical to SEQ ID NO: 1149

SEQ ID NO: 1151 - protein, 119 aa, synthetic construct; identical to SEQ ID NO: 196
  REGION 1..119: note = Description of Artificial Sequence: Synthetic polypeptide

SEQ ID NO: 1152 - protein, 119 aa, synthetic construct; identical to SEQ ID NO: 205
  REGION 1..119: note = Description of Artificial Sequence: Synthetic polypeptide

SEQ ID NO: 1153 - protein, 119 aa, synthetic construct; identical to SEQ ID NO: 214
  REGION 1..119: note = Description of Artificial Sequence: Synthetic polypeptide

SEQ ID NO: 1154 - protein, 119 aa, synthetic construct; identical to SEQ ID NO: 223
  REGION 1..119: note = Description of Artificial Sequence: Synthetic polypeptide

SEQ ID NO: 1155 - protein, 119 aa, synthetic construct; identical to SEQ ID NO: 232
  REGION 1..119: note = Description of Artificial Sequence: Synthetic polypeptide

SEQ ID NO: 1156 - protein, 119 aa, synthetic construct; identical to SEQ ID NO: 241
  REGION 1..119: note = Description of Artificial Sequence: Synthetic polypeptide

SEQ ID NO: 1157 - protein, 119 aa, synthetic construct; identical to SEQ ID NO: 250
  REGION 1..119: note = Description of Artificial Sequence: Synthetic polypeptide

SEQ ID NO: 1158 - protein, 119 aa, synthetic construct; identical to SEQ ID NO: 259
  REGION 1..119: note = Description of Artificial Sequence: Synthetic polypeptide

SEQ ID NO: 1159 - protein, 119 aa, synthetic construct; identical to SEQ ID NO: 268
  REGION 1..119: note = Description of Artificial Sequence: Synthetic polypeptide

SEQ ID NO: 1160 - protein, 119 aa, synthetic construct; identical to SEQ ID NO: 277
  REGION 1..119: note = Description of Artificial Sequence: Synthetic polypeptide

SEQ ID NO: 1161 - protein, 119 aa, synthetic construct; identical to SEQ ID NO: 286
  REGION 1..119: note = Description of Artificial Sequence: Synthetic polypeptide

SEQ ID NO: 1162 - protein, 112 aa, synthetic construct; identical to SEQ ID NO: 411
  REGION 1..112: note = Description of Artificial Sequence: Synthetic polypeptide

SEQ ID NO: 1163 - protein, 112 aa, synthetic construct; identical to SEQ ID NO: 420
  REGION 1..112: note = Description of Artificial Sequence: Synthetic polypeptide

SEQ ID NO: 1164 - protein, 112 aa, synthetic construct; identical to SEQ ID NO: 429
  REGION 1..112: note = Description of Artificial Sequence: Synthetic polypeptide

SEQ ID NO: 1165 - protein, 112 aa, synthetic construct; identical to SEQ ID NO: 438
  REGION 1..112: note = Description of Artificial Sequence: Synthetic polypeptide

SEQ ID NO: 1166 - protein, 112 aa, synthetic construct; identical to SEQ ID NO: 447
  REGION 1..112: note = Description of Artificial Sequence: Synthetic polypeptide

SEQ ID NO: 1167 - protein, 112 aa, synthetic construct; identical to SEQ ID NO: 456
  REGION 1..112: note = Description of Artificial Sequence: Synthetic polypeptide

SEQ ID NO: 1168 - protein, 112 aa, synthetic construct; identical to SEQ ID NO: 465
  REGION 1..112: note = Description of Artificial Sequence: Synthetic polypeptide

SEQ ID NO: 1169 - protein, 112 aa, synthetic construct; identical to SEQ ID NO: 474
  REGION 1..112: note = Description of Artificial Sequence: Synthetic polypeptide

SEQ ID NO: 1170 - protein, 112 aa, synthetic construct; identical to SEQ ID NO: 483
  REGION 1..112: note = Description of Artificial Sequence: Synthetic polypeptide

SEQ ID NO: 1171 - protein, 112 aa, synthetic construct; identical to SEQ ID NO: 491
  REGION 1..112: note = Description of Artificial Sequence: Synthetic polypeptide

SEQ ID NO: 1172 - protein, 112 aa, synthetic construct; identical to SEQ ID NO: 500
  REGION 1..112: note = Description of Artificial Sequence: Synthetic polypeptide

SEQ ID NO: 1173 - protein, 112 aa, synthetic construct; identical to SEQ ID NO: 581
  REGION 1..112: note = Description of Artificial Sequence: Synthetic polypeptide

SEQ ID NO: 1174 - protein, 112 aa, synthetic construct; identical to SEQ ID NO: 590
  REGION 1..112: note = Description of Artificial Sequence: Synthetic polypeptide

SEQ ID NO: 1175 - protein, 119 aa, synthetic construct; identical to SEQ ID NO: 196
  REGION 1..119: note = Description of Artificial Sequence: Synthetic polypeptide

SEQ ID NO: 1176 - protein, 98 aa, Homo sapiens
EVQLLESGGGLVQPGGSLRLSCAASGFTFSSYAMSWVRQAPGKGLEWVSVIYSGGSSTYYADSVKGRFTISRDNSKNTLYLQMNSLRAEDTAVYYCAK

SEQ ID NO: 1177 - protein, 11 aa, Homo sapiens
WGQGTLVTVSS

SEQ ID NO: 1178 - protein, 98 aa, Homo sapiens
QVQLVESGGGVVQPGGSLRLSCAASGFTFSSYGMHWVRQAPGKGLEWVAFIRYDGSNKYYADSVKGRFTISRDNSKNTLYLQMNSLRAEDTAVYYCAK

SEQ ID NO: 1179 - protein, 119 aa, synthetic construct; identical to SEQ ID NO: 295
  REGION 1..119: note = Description of Artificial Sequence: Synthetic polypeptide

SEQ ID NO: 1180 - protein, 112 aa, synthetic construct; identical to SEQ ID NO: 411
  REGION 1..112: note = Description of Artificial Sequence: Synthetic polypeptide

SEQ ID NO: 1181 - protein, 95 aa, Homo sapiens
DIQMTQSPSSLSASVGDRVTITCRASQSISSYLNWYQQKPGKAPKLLIYAASSLQSGVPSRFSGSGSGTDFTLTISSLQPEDFATYYCQQSYSTP

SEQ ID NO: 1182 - protein, 10 aa, Homo sapiens
FGQGTKLEIK

SEQ ID NO: 1183 - protein, 95 aa, Homo sapiens
DIQMTQSPSSLSASVGDRVTITCRASQGIRNDLGWYQQKPGKAPKRLIYAASSLQSGVPSRFSGSGSGTEFTLTISSLQPEDFATYYCLQHNSYP

SEQ ID NO: 1184 - protein, 112 aa, synthetic construct; identical to SEQ ID NO: 509
  REGION 1..112: note = Description of Artificial Sequence: Synthetic polypeptide

SEQ ID NO: 1185 - protein, 119 aa, synthetic construct; identical to SEQ ID NO: 196
  REGION 1..119: note = Description of Artificial Sequence: Synthetic polypeptide

SEQ ID NO: 1186 - protein, 119 aa, synthetic construct; identical to SEQ ID NO: 295
  REGION 1..119: note = Description of Artificial Sequence: Synthetic polypeptide

SEQ ID NO: 1187 - protein, 119 aa, synthetic construct; identical to SEQ ID NO: 304
  REGION 1..119: note = Description of Artificial Sequence: Synthetic polypeptide

SEQ ID NO: 1188 - protein, 119 aa, synthetic construct; identical to SEQ ID NO: 313
  REGION 1..119: note = Description of Artificial Sequence: Synthetic polypeptide

SEQ ID NO: 1189 - protein, 119 aa, synthetic construct; identical to SEQ ID NO: 321
  REGION 1..119: note = Description of Artificial Sequence: Synthetic polypeptide

SEQ ID NO: 1190 - protein, 119 aa, synthetic construct; identical to SEQ ID NO: 330
  REGION 1..119: note = Description of Artificial Sequence: Synthetic polypeptide

SEQ ID NO: 1191 - protein, 119 aa, synthetic construct; identical to SEQ ID NO: 339
  REGION 1..119: note = Description of Artificial Sequence: Synthetic polypeptide

SEQ ID NO: 1192 - protein, 119 aa, synthetic construct; identical to SEQ ID NO: 348
  REGION 1..119: note = Description of Artificial Sequence: Synthetic polypeptide

SEQ ID NO: 1193 - protein, 119 aa, synthetic construct; identical to SEQ ID NO: 357
  REGION 1..119: note = Description of Artificial Sequence: Synthetic polypeptide

SEQ ID NO: 1194 - protein, 119 aa, synthetic construct
  REGION 1..119: note = Description of Artificial Sequence: Synthetic polypeptide
EVQLLESGGGLVQPGGSLRLSCAASGYTFTTYWITWVRQAPGKGLEWVSDIYPGSSICNYADSVKGRFTISRDNSKNTLYLQMNSLRAEDTAVYYCAREDGYDAWFAYWGQGTLVTVSS

SEQ ID NO: 1195 - protein, 119 aa, synthetic construct
  REGION 1..119: note = Description of Artificial Sequence: Synthetic polypeptide
EVQLLESGGGLVQPGGSLRLSCAASGYTFTTYWITWVRQAPGKGLEWVSDIYPGSSICNYADSVKGRFTISRDNSKNTLYLQMNSLRAEDTAVYYCAKEDGYDAWFAYWGQGTLVTVSS

SEQ ID NO: 1196 - protein, 119 aa, synthetic construct; identical to SEQ ID NO: 1194
  REGION 1..119: note = Description of Artificial Sequence: Synthetic polypeptide

SEQ ID NO: 1197 - protein, 119 aa, synthetic construct; identical to SEQ ID NO: 384
  REGION 1..119: note = Description of Artificial Sequence: Synthetic polypeptide

SEQ ID NO: 1198 - protein, 119 aa, synthetic construct; identical to SEQ ID NO: 393
  REGION 1..119: note = Description of Artificial Sequence: Synthetic polypeptide

SEQ ID NO: 1199 - protein, 119 aa, synthetic construct; identical to SEQ ID NO: 402
  REGION 1..119: note = Description of Artificial Sequence: Synthetic polypeptide

SEQ ID NO: 1200 - protein, 112 aa, synthetic construct; identical to SEQ ID NO: 411
  REGION 1..112: note = Description of Artificial Sequence: Synthetic polypeptide

SEQ ID NO: 1201 - protein, 112 aa, synthetic construct; identical to SEQ ID NO: 509
  REGION 1..112: note = Description of Artificial Sequence: Synthetic polypeptide

SEQ ID NO: 1202 - protein, 112 aa, synthetic construct; identical to SEQ ID NO: 518
  REGION 1..112: note = Description of Artificial Sequence: Synthetic polypeptide

SEQ ID NO: 1203 - protein, 112 aa, synthetic construct; identical to SEQ ID NO: 527
  REGION 1..112: note = Description of Artificial Sequence: Synthetic polypeptide

SEQ ID NO: 1204 - protein, 112 aa, synthetic construct; identical to SEQ ID NO: 536
  REGION 1..112: note = Description of Artificial Sequence: Synthetic polypeptide

SEQ ID NO: 1205 - protein, 112 aa, synthetic construct; identical to SEQ ID NO: 545
  REGION 1..112: note = Description of Artificial Sequence: Synthetic polypeptide

SEQ ID NO: 1206 - protein, 112 aa, synthetic construct; identical to SEQ ID NO: 554
  REGION 1..112: note = Description of Artificial Sequence: Synthetic polypeptide

SEQ ID NO: 1207 - protein, 112 aa, synthetic construct; identical to SEQ ID NO: 563
  REGION 1..112: note = Description of Artificial Sequence: Synthetic polypeptide

What is claimed:

1. A labeled antibody or antigen-binding fragment comprising a monoclonal antibody, or an antigen-binding fragment thereof, that specifically binds a human Tau, wherein the antibody comprises:
a heavy chain variable domain (HCVD) comprising SEQ ID NO: 268 and a light chain variable domain (LCVD) comprising SEQ ID NO: 465;
a HCVD comprising SEQ ID NO: 268 and a LCVD comprising SEQ ID NO: 581;
a HCVD comprising SEQ ID NO: 384 and a LCVD comprising SEQ ID NO: 545;
a HCVD comprising SEQ ID NO: 393 and a LCVD comprising SEQ ID NO: 545;
a HCVD comprising SEQ ID NO: 402 and a LCVD comprising SEQ ID NO: 545;
a HCVD comprising SEQ ID NO: 384 and a LCVD comprising SEQ ID NO: 572;
a HCVD comprising SEQ ID NO: 393 and a LCVD comprising SEQ ID NO: 572; or
a HCVD comprising SEQ ID NO: 196 and a LCVD comprising SEQ ID NO: 411.

2. The labeled antibody or antigen-binding fragment of claim 1 comprising a fluorescent label, chromophoric label, electron-dense label, chemiluminescent label, radioactive labels, enzyme, or detectable ligand.

3. A nucleic acid molecule encoding a monoclonal antibody, or an antigen-binding fragment thereof, that specifically binds a human Tau, wherein the antibody comprises:
a heavy chain variable domain (HCVD) comprising SEQ ID NO: 268 and a light chain variable domain (LCVD) comprising SEQ ID NO: 465;
a HCVD comprising SEQ ID NO: 268 and a LCVD comprising SEQ ID NO: 581;
a HCVD comprising SEQ ID NO: 384 and a LCVD comprising SEQ ID NO: 545;
a HCVD comprising SEQ ID NO: 393 and a LCVD comprising SEQ ID NO: 545;
a HCVD comprising SEQ ID NO: 402 and a LCVD comprising SEQ ID NO: 545;
a HCVD comprising SEQ ID NO: 384 and a LCVD comprising SEQ ID NO: 572;
a HCVD comprising SEQ ID NO: 393 and a LCVD comprising SEQ ID NO: 572; or
a HCVD comprising SEQ ID NO: 196 and a LCVD comprising SEQ ID NO: 411.

4. A vector comprising the nucleic acid molecule of claim 3.

5. A cell that expresses the nucleic acid molecule of claim 3.

6. A method of producing an anti-Tau antibody or antigen-binding fragment comprising culturing a cell according to claim 5 under conditions suitable for producing the antibody or antigen-binding fragment.

7. The method according to claim 6 further comprising recovering the antibody or antigen-binding fragment.

8. A method for decreasing sarkosyl-insoluble Tau levels in a subject in need thereof, the method comprising administering to the subject a monoclonal antibody, or an antigen-binding fragment thereof, that specifically binds a human Tau, wherein the antibody comprises:
a heavy chain variable domain (HCVD) comprising SEQ ID NO: 268 and a light chain variable domain (LCVD) comprising SEQ ID NO: 465;
a HCVD comprising SEQ ID NO: 268 and a LCVD comprising SEQ ID NO: 581;
a HCVD comprising SEQ ID NO: 384 and a LCVD comprising SEQ ID NO: 545;
a HCVD comprising SEQ ID NO: 393 and a LCVD comprising SEQ ID NO: 545;
a HCVD comprising SEQ ID NO: 402 and a LCVD comprising SEQ ID NO: 545;
a HCVD comprising SEQ ID NO: 384 and a LCVD comprising SEQ ID NO: 572;
a HCVD comprising SEQ ID NO: 393 and a LCVD comprising SEQ ID NO: 572; or
a HCVD comprising SEQ ID NO: 196 and a LCVD comprising SEQ ID NO: 411.

9. A method for inhibiting Tau aggregation in a subject in need thereof, the method comprising administering to the subject a monoclonal antibody, or an antigen-binding fragment thereof, that specifically binds a human Tau, wherein the antibody comprises:
a heavy chain variable domain (HCVD) comprising SEQ ID NO: 268 and a light chain variable domain (LCVD) comprising SEQ ID NO: 465;
a HCVD comprising SEQ ID NO: 268 and a LCVD comprising SEQ ID NO: 581;
a HCVD comprising SEQ ID NO: 384 and a LCVD comprising SEQ ID NO: 545;
a HCVD comprising SEQ ID NO: 393 and a LCVD comprising SEQ ID NO: 545;
a HCVD comprising SEQ ID NO: 402 and a LCVD comprising SEQ ID NO: 545;
a HCVD comprising SEQ ID NO: 384 and a LCVD comprising SEQ ID NO: 572;
a HCVD comprising SEQ ID NO: 393 and a LCVD comprising SEQ ID NO: 572; or
a HCVD comprising SEQ ID NO: 196 and a LCVD comprising SEQ ID NO: 411.

10. A method of treating a Tauopathy in a subject in need thereof, the method comprising: administering to the subject a monoclonal antibody, or an antigen-binding fragment thereof, that specifically binds a human Tau, wherein the antibody comprises:
a heavy chain variable domain (HCVD) comprising SEQ ID NO: 268 and a light chain variable domain (LCVD) comprising SEQ ID NO: 465;
a HCVD comprising SEQ ID NO: 268 and a LCVD comprising SEQ ID NO: 581;
a HCVD comprising SEQ ID NO: 384 and a LCVD comprising SEQ ID NO: 545;
a HCVD comprising SEQ ID NO: 393 and a LCVD comprising SEQ ID NO: 545;
a HCVD comprising SEQ ID NO: 402 and a LCVD comprising SEQ ID NO: 545;
a HCVD comprising SEQ ID NO: 384 and a LCVD comprising SEQ ID NO: 572;
a HCVD comprising SEQ ID NO: 393 and a LCVD comprising SEQ ID NO: 572; or
a HCVD comprising SEQ ID NO: 196 and a LCVD comprising SEQ ID NO: 411, under conditions effective to treat the Tauopathy in the subject.

11. The method according to claim 10, wherein the Tauopathy is Alzheimer's disease, frontotemporal dementia, or progressive supranuclear palsy.

12. The method according to claim 11, wherein the frontotemporal dementia is Pick's disease.
